(19) United States
(12) Patent Application Publication
(10) Pub. No.: US 2021/0317457 A1
(43) Pub. Date: Oct. 14, 2021

(54) ANTISENSE OLIGONUCLEOTIDE (ASO) MOLECULES AND USES THEREOF FOR CORONAVIRUS DISEASES

(71) Applicant: ALIGOS THERAPEUTICS, INC., South San Francisco, CA (US)

(72) Inventors: Leonid BEIGELMAN, South San Francisco, CA (US); Antitsa STOYCHEVA, South San Francisco, CA (US); Aneerban BHATTACHARYA, South San Francisco, CA (US); David Bernard SMITH, South San Francisco, CA (US); Rajendra K. PANDEY, Foster City, CA (US); Saul Martinez MONTERO, San Bruno, CA (US); Vivek Kumar RAJWANSHI, Cupertino, CA (US); Jin HONG, Pacifica, CA (US)

(73) Assignee: ALIGOS THERAPEUTICS, INC., South San Francisco, CA (US)

(21) Appl. No.: 17/226,710

(22) Filed: Apr. 9, 2021

Related U.S. Application Data
(60) Provisional application No. 63/008,344, filed on Apr. 10, 2020.

(51) Int. Cl. C12N 15/113; A61K 45/06; A61K 31/713; A61P 31/14

(52) U.S. Cl. CPC C12N 15/1131; A61K 45/06; A61K 31/713; A61P 31/14; C12N 2310/11; C12N 2310/314; C12N 2310/351; C12N 2310/341; C12N 2310/321; C12N 2310/3231; C12N 2320/31; C12N 2310/315

(57) ABSTRACT

The present disclosure relates to the field of pharmaceutical compounds and preparations and method of their use in the treatment of disease. Described are antisense oligonucleotide (ASO) molecules, compositions containing the same, and uses thereof for treating or preventing coronavirus infections. In particular, the present disclosure provides specific ASOs that are effective against a broad spectrum of coronaviruses, and especially the β-coronaviruses, including SARS-CoV-2, the causative agent of COVID-19.

### CROSS-REFERENCE STATEMENT

[0001] This application claims priority to U.S. Provisional Application No. 63/008,344, filed Apr. 10, 2020, the disclosure of which is hereby incorporated by reference in its entirety.

### FIELD OF THE INVENTION

[0002] The present disclosure relates to the field of pharmaceutical compounds and preparations and method of their use in the treatment of disease. Described are antisense oligonucleotide (ASO) molecules, compositions containing the same, and uses thereof for treating or preventing coronavirus infections. In particular, the present disclosure provides specific ASOs that are effective against a broad spectrum of coronaviruses, and especially the β-coronaviruses, including SARS-CoV-2, the causative agent of COVID-19.

### BACKGROUND

[0003] The following discussion is merely provided to aid the reader in understanding the disclosure and is not admitted to describe or constitute prior art thereto.

[0004] Coronavirus disease 2019 (COVID-19) (also referred to as novel coronavirus pneumonia or 2019-nCoV acute respiratory disease) is an infectious disease caused by the virus severe respiratory syndrome coronavirus 2 (SARS-CoV-2) (also referred to as novel coronavirus 2019, or 2019-nCoV). The disease was first identified in December 2019 and spread globally, causing a pandemic. Symptoms of COVID-19 include fever, cough, shortness of breath, fatigue, headache, loss of smell, nasal congestion, sore throat, coughing up sputum, pain in muscles or joints, chills, nausea, vomiting, and diarrhea. In severe cases, symptoms can include difficulty waking, confusion, blueish face or lips, coughing up blood, decreased white blood cell count, and kidney failure. Complications can include pneumonia, viral sepsis, acute respiratory distress syndrome, and kidney failure.

[0005] COVID-19 is especially threatening to public health. The virus is highly contagious, and studies currently indicate that it can be spread by asymptomatic carriers or by those who are pre-symptomatic. Likewise, the early stage of the disease is slow-progressing enough that carriers do not often realize they are infected, leading them to expose numerous others to the virus. The combination of COVID-19's ease of transmission, its high rate of hospitalization of victims, and its death rate make the virus a substantial public health risk, especially for countries without a healthcare system equipped to provide supportive care to pandemic-level numbers of patients. There is not yet a vaccine or specific antiviral treatment for COVID-19 and accordingly, there is a pressing need for treatments or cures.

[0006] SARS-CoV-2 is not the only coronavirus that causes disease. It is a β-coronavirus, a genus of coronaviruses that includes other human pathogens, including SARS-CoV (the causative agent of SARS), MERS-CoV (the causative agent of MERS), and HCoV-OC43 (a causative agent of the common cold). The infectivity of these viruses, and the severity of the diseases they cause, varies widely. β-coronavirus can also manifest as zoonotic infections, spread to and from humans and animals. Additionally, non-human species such as camels, bats, tigers, non-human primates, and rabbits can be susceptible to β-coronavirus. Accordingly, there is a pressing need for treatments or cures to multiple coronaviruses.

[0007] Antisense oligonucleotides (ASOs) are short, single-stranded DNA molecules that interact with messenger RNA to prevent translation of a targeted gene. Their DNA sequence is complementary to the specific mRNA target; binding leads to degradation of the DNA sequences with failure of protein production. Antisense oligonucleotides can be designed for many RNA sequences, so they have the potential to be useful as therapeutics for diverse diseases. Accordingly, ASO therapy has been proposed for the treatment of metabolic diseases, neurodegenerative diseases, cancer, and pathogenic infections.

[0008] The present disclosure provides ASO molecules useful against coronaviruses, and especially SARS-CoV-2, the causative agent of COVID-19 in humans. Accordingly, the present disclosure fulfills the need in the art for compounds that can be safely and effectively treat or prevent coronavirus infections in humans.

### SUMMARY

[0009] Described herein are antisense oligonucleotide (ASO) molecules and methods of using the same to treat or prevent a disease, such as a coronavirus infection.

[0010] In one aspect, the present disclosure provides an antisense oligonucleotide (ASO) comprising a 5′-wing region (A′), a central region (B′), and a 3′-wing region (C′) that together comprise 8 to 22 total nucleotide units, wherein: (a) a central region (B′) comprising 6 or more contiguous nucleotide units, (b) a 5′-wing region (A′) comprising 2 to 6 locked nucleotide units, 2′ substituted nucleotide units, or a combination thereof, and (c) a 3′-wing region (C′) comprising 2 to 6 locked nucleotide units, 2′ substituted nucleotide units, or a combination thereof; and wherein the ASO is complementary or hybridizes to a viral target RNA sequence in a coronavirus.

[0011] In some embodiments, the 5′-wing region of the ASO comprises 2 to 6 phosphorothioate-linked locked nucleosides. In some embodiments, the 3′-wing region of the ASO comprises 2 to 6 phosphorothioate-linked locked nucleosides. In some embodiments, the central region of the ASO comprises at least 5 contiguous phosphorothioate-linked DNA nucleosides.

[0012] In some embodiments, the central region of the ASO comprises 8 to 10 contiguous phosphorothioate-linked DNA nucleosides. In some embodiments, the locked nucleosides are selected from LNA, scpBNA, AmNA (N—H), AmNA (N-Me), GuNA, GuNA (N-R) where R is selected from Me, Et, i-Pr, t-Bu and combinations thereof.

[0013] In some embodiments, the 3′-wing region and the 5′-wing region comprise the same number of nucleotide units. In some embodiments, the 3′-wing region and the 5′-wing region comprise 3 nucleotide units and the central region comprises 10 nucleotide units. In some embodiments, the 3′-wing region and the 5′-wing region comprise 4 nucleotide units and the central region comprises 10 nucleotide units.

[0014] In some embodiments, the 3′-wing region and the 5′-wing region comprise a different number of nucleotide units. In some embodiments, the 3′-wing region comprises 3 nucleotide units, the 5′-wing region comprises 5 nucleotide units, and the central region comprises 10 nucleotide units.

[0015] In some embodiments, the ASO may further comprise one or more conjugation moieties.

[0016] In some embodiments, one T in the central region is replaced by (2s)T, one C in the central region is replaced by (5OH)C, one A is replaced by (8NH)A in the central region, and/or one G in the central region is replaced by (8NH)G.

[0017] In some embodiments, the 5′-wing region and/or the 3′-wing region comprises one or two ScpBNA, AmNA, or GuNA.

[0018] In some embodiments, the 5′-wing region and/or the 3′-wing region comprises a mA or mU appended to the end of the sequence. In some embodiments, the mA or mU is linked to a conjugation moiety.

[0019] In some embodiments, the ASO comprises 14-22 nucleotide units. For example, in some embodiments, the ASO comprises 16, 17, 18, or 20 nucleotide units.

[0020] In some embodiments, the viral target RNA sequence encodes a non-structural protein (nsp). In some embodiments, the nsp is selected from the group consisting of nsp8, nsp9, nsp10, nsp11, nsp12, nsp13, nsp14, and nsp15.

[0021] In some embodiments, the ASO comprises at least 8 nucleotide units from any one of SEQ ID NOs: 1-5534.

[0022] In some embodiments, the ASO comprises a sequence of any one of SEQ ID NOs: 1-5534.

[0023] In some embodiments, the ASO is at least about 75%, about 76%, about 77%, about 78%, about 79%, about 80%, about 81%, about 82%, about 83%, about 84%, about 85%, about 86%, about 87%, about 88%, about 89%, about 90%, about 91%, about 92%, about 93%, about 94%, about 95%, about 96%, about 97%, about 98%, about 99%, or about 100% identical or complementary to the viral target RNA sequence.

[0024] In some embodiments, the ASO comprises a sequence that is at least about 75%, about 76%, about 77%, about 78%, about 79%, about 80%, about 81%, about 82%, about 83%, about 84%, about 85%, about 86%, about 87%, about 88%, about 89%, about 90%, about 91%, about 92%, about 93%, about 94%, about 95%, about 96%, about 97%, about 98%, about 99%, or about 100% identical or complementary to at least 8 consecutive nucleotide units of GenBank Accession NC_045512.2. In some embodiments, the ASO comprises a sequence that is at least about 75%, about 76%, about 77%, about 78%, about 79%, about 80%, about 81%, about 82%, about 83%, about 84%, about 85%, about 86%, about 87%, about 88%, about 89%, about 90%, about 91%, about 92%, about 93%, about 94%, about 95%, about 96%, about 97%, about 98%, about 99%, or about 100% identical or complementary to at least 16 consecutive nucleotide units of GenBank Accession NC 045512.2.

[0025] In some embodiments, the ASO comprises a sequence that is at least about 75%, about 76%, about 77%, about 78%, about 79%, about 80%, about 81%, about 82%, about 83%, about 84%, about 85%, about 86%, about 87%, about 88%, about 89%, about 90%, about 91%, about 92%, about 93%, about 94%, about 95%, about 96%, about 97%, about 98%, about 99%, or about 100% identical or complementary to at least 8 consecutive nucleotide units of any one of the sequences listed in Table 2. In some embodiments, the ASO comprises a sequence that is at least about 75%, about 76%, about 77%, about 78%, about 79%, about 80%, about 81%, about 82%, about 83%, about 84%, about 85%, about 86%, about 87%, about 88%, about 89%, about 90%, about 91%, about 92%, about 93%, about 94%, about 95%, about 96%, about 97%, about 98%, about 99%, or about 100% identical or complementary to at least 16 consecutive nucleotide units of any one of the sequences listed in Table 2.

[0026] In another aspect, the present disclosure provides an antisense oligonucleotide (ASO) comprising 14-22 nucleotide units, wherein the ASO comprises:

(a) a central region (B′) comprising 6 or more contiguous DNA nucleosides, wherein at least one of the contiguous DNA nucleosides is a modified nucleotide,
(b) a 5′-wing region (A′) comprising 2 to 6 locked nucleosides, 2′ substituted nucleosides, or a combination thereof, and
(c) a 3′-wing region (C′) comprising 2 to 6 locked nucleosides, 2′ substituted nucleosides, or a combination thereof,
wherein the ASO is complementary or hybridizes to a viral target RNA sequence in a coronavirus.

[0027] In some embodiments, the modified nucleotide occurs at the nucleotide at position 3 from the 5′ end of the central region.

[0028] In some embodiments, the modified nucleotide is a nucleotide having a protected or unprotected version of

[chemical structure]

[0029] wherein:

R is a halogen or R′—C≡C—; and
R′ is C₆₋₁₂ aryl, 5- to 12-membered heteroaryl, hydroxy-C₁₋₆ alkyl, or C₁₋₇ alkanoyloxy.

[0030] In some embodiments, the modified nucleotide is a nucleotide having the structure of:

[chemical structure]

wherein:
W is independently O, N, or S;
R₁, R₂, and R₅ are independently H or D or CH₃ or CD₃;

### R₃ is H or F;

[0031] R₄ is F or OCH₃ or OCD₃; and

### Base is

[chemical structure]

wherein:
R is a halogen or R′—C≡C—; and
R′ represents C₆₋₁₂ aryl, 5- to 12-membered heteroaryl, hydroxy-C₁₋₆ alkyl, or C₁₋₇ alkanoyloxy.

[0033] In some embodiments, the ASO comprises a nucleotide sequence that is at least 90% identical to a nucleotide sequence selected from the sequences listed in Table 1 or 2. In some embodiments, the viral target RNA sequence encodes a non-structural protein (nsp). In some embodiments, the nsp is selected from the group consisting of nsp8, nsp9, nsp10, nsp11, nsp12, nsp13, nsp14, and nsp15. In some embodiments, the ASO is at least about 75%, about 76%, about 77%, about 78%, about 79%, about 80%, about 81%, about 82%, about 83%, about 84%, about 85%, about 86%, about 87%, about 88%, about 89%, about 90%, about 91%, about 92%, about 93%, about 94%, about 95%, about 96%, about 97%, about 98%, about 99%, or about 100% identical or complementary to the viral target RNA sequence.

[0034] In some embodiments of the foregoing aspects, the coronavirus is an α-coronavirus or a β-coronavirus. In some embodiments, the coronavirus is selected from the group consisting of CoV 229E, CoV NL63, CoV OC43, CoV HKU1, Middle East Respiratory Syndrome (MERS)-CoV, Severe Acute Respiratory Syndrome (SARS)-CoV, and SARS-CoV-2.

[0035] In another aspect, the present disclosure provides an antisense oligonucleotide (ASO) comprising any one of SEQ ID NOs: 5539-5718 In some embodiments, the ASO of claim 28, wherein the ASO is selected from ASO-143 (SEQ ID NO: 5682), ASO-144 (SEQ ID NO: 5683), ASO-145 (SEQ ID NO: 5684), ASO-146 (SEQ ID NO: 5685), ASO-147 (SEQ ID NO: 5686), ASO-148 (SEQ ID NO: 5687), ASO-149 (SEQ ID NO: 5688), ASO-150 (SEQ ID NO: 5689), ASO-151 (SEQ ID NO: 5690), ASO-152 (SEQ ID NO: 5691), ASO-153 (SEQ ID NO: 5692), ASO-154 (SEQ ID NO: 5693), ASO-155 (SEQ ID NO: 5694), ASO-156 (SEQ ID NO: 5695), ASO-158 (SEQ ID NO: 5697), ASO-159 (SEQ ID NO: 5698), ASO-160 (SEQ ID NO: 5699), ASO-163 (SEQ ID NO: 5702), ASO-164 (SEQ ID NO: 5703), ASO-165 (SEQ ID NO: 5704), ASO-166 (SEQ ID NO: 5705), ASO-167 (SEQ ID NO: 5706), ASO-168 (SEQ ID NO: 5707), ASO-169 (SEQ ID NO: 5708), ASO-170 (SEQ ID NO: 5709), ASO-171 (SEQ ID NO: 5710), ASO-172 (SEQ ID NO: 5711), ASO-173 (SEQ ID NO: 5712), ASO-174 (SEQ ID NO: 5713), ASO-175 (SEQ ID NO: 5714), ASO-176 (SEQ ID NO: 5715), ASO-177 (SEQ ID NO: 5716), ASO-178 (SEQ ID NO: 5717), and ASO-179 (SEQ ID NO: 5718).

[0036] In another aspect, the present disclosure provides an ASO of any of the foregoing embodiments for use in treatment or prevention of a disease. In some embodiments, the disease is a coronavirus infection.

[0037] In another aspect, the present disclosure provides a pharmaceutical composition comprising one or more of the ASOs of any of the foregoing aspects and a pharmaceutically acceptable carrier. In some embodiments, the pharmaceutical composition is for use in the treatment or prevention of a disease. In some embodiments, the disease is a coronavirus infection.

[0038] In another aspect, the present disclosure provides a method of treating or preventing a disease, comprising administering to a subject in need thereof a therapeutically effective amount of one or more of the ASOs of any one of the foregoing aspects or the pharmaceutical composition of any one of the foregoing aspects.

[0039] In some embodiments of the disclosed methods, the disease is a viral disease. In some embodiments, the viral disease is caused by an RNA virus. In some embodiments, the RNA virus is a single-stranded RNA virus (ssRNA virus). In some embodiments, the ssRNA virus is a positive-sense single-stranded RNA virus ((+)ssRNA virus). In some embodiments, (+)ssRNA virus is a coronavirus. In some embodiments, the coronavirus is a β-coronavirus.

[0040] In some embodiments of the disclosed methods, the disease is a coronavirus infection selected from the group consisting of Middle East Respiratory Syndrome (MERS), Severe Acute Respiratory Syndrome (SARS), and COVID-19.

[0041] In some embodiments of the disclosed methods, the subject has been treated with one or more additional coronavirus treatment agents and/or antiviral agents. In some embodiments of the disclosed methods, the subject is concurrently treated with one or more additional coronavirus treatment agents and/or antiviral agents.

[0042] In some embodiments of the disclosed methods, the subject is a human, for example a human subject that is 60 years old or older. In some embodiments of the disclosed methods, the subject is a non-human primate. In some embodiments of the disclosed methods, the subject is a cat. In some embodiments of the disclosed methods, the subject is a camel.

[0043] In some embodiments of the disclosed methods, the disease causes one or more symptoms selected from coughing, sore throat, runny nose, sneezing, headache, fever, shortness of breath, myalgia, abdominal pain, fatigue, difficulty breathing, persistent chest pain or pressure, difficulty waking, loss of smell and taste, muscle or joint pain, chills, nausea or vomiting, nasal congestion, diarrhea, haemoptysis, conjunctival congestion, sputum production, chest tightness, and palpitations. In some embodiments of the disclosed methods, the disease can cause complications selected from sinusitis, otitis media, pneumonia, acute respiratory distress syndrome, disseminated intravascular coagulation, pericarditis, and kidney failure.

[0044] In another aspect, the present disclosure provides a use of one or more of the ASOs of any one of claims 1-29 for the manufacture of a medicament for treating or preventing a disease. In some embodiments, the disease is a coronavirus infection.

[0045] In some embodiments of the disclosed methods and uses, the ASO is administered intravenously, subcutaneously, or via inhalation.

[0046] The foregoing general description and following detailed description are exemplary and explanatory and are intended to provide further explanation of the disclosure as claimed. Other objects, advantages, and novel features will be readily apparent to those skilled in the art from the following brief description of the drawings and detailed description of the disclosure.

### BRIEF DESCRIPTION OF THE DRAWINGS

[0047] FIG. 1 (FIG. 1) shows the coronaviridae family and its four genera (top panel) and the full-length genome of NCBI 407 (bottom panel), which encodes 28 proteins across multiple open reading frames (ORFs).

[0048] FIG. 2 (FIG. 2) shows the percent identity between multiple coronavirus, including sudden acute respiratory syndrome coronavirus (SARS-CoV), Middle East respiratory syndrome coronavirus (MERS-CoV), and human coronavirus OC43 (top panel), and an alignment of the highly similar region of the genomes encodings non-structural protein 8 (nsp8) to non-structural protein (nsp15) (bottom panel).

[0049] FIG. 3 (FIG. 3) shows details of nsp8-nsp15.

### DETAILED DESCRIPTION

[0050] Disclosed herein are antisense oligonucleotide (ASO) molecules. The disclosed ASO molecules comprise a 5′-wing region (A′), a central region (B′), and a 3′-wing region (C′) that together comprise 8 to 20 total nucleotide units, wherein: (a) a central region (B′) comprising 6 or more contiguous nucleotide units, (b) a 5′-wing region (A′) comprising 2 to 6 locked nucleotide units or 2′ substituted nucleotide units, and (c) a 3′-wing region (C′) comprising 2 to 6 locked nucleotide units or 2′ substituted nucleotide units; and wherein the ASO is complementary or hybridizes to a viral target RNA sequence in a coronavirus. In some embodiments, the sequence of the ASO molecules may comprise one or more modified, lock, conjugated, or linked nucleotide units, and the ASO may comprise a targeting moiety to direct its uptake in a particular cell type.

[0051] Further disclosed herein are pharmaceutical compositions comprising one or more of the disclosed ASO molecules and a pharmaceutically acceptable carrier or diluent.

[0052] Further disclosed herein is a method for treating a disease in a subject in need thereof, comprising administering the subject one or more ASOs or pharmaceutical compositions of any of the embodiments described herein. In some embodiments, the disease is a viral infection, such as a coronavirus infection.

[0053] Further disclosed herein is the use of one or more ASOs according to any of the embodiments described herein in the manufacture of a medicament for treating a disease, such as a viral infection or, more specifically, a coronavirus infection.

[0054] Further disclosed herein is a method of treating a β-coronavirus-caused disease in a subject in need thereof, comprising administering the subject one or more ASOs according to any of the embodiments described herein.

[0055] Exemplary siNA, which may be used to treat and/or prevent coronavirus infections (e.g., COVID-19) are also described herein.

### Definitions

[0056] It is to be understood that methods are not limited to the particular embodiments described, and as such may vary. It is also to be understood that the terminology used herein is for the purpose of describing particular embodiments only and is not intended to be limiting. The scope of the present technology will be limited only by the appended claims.

[0057] Unless defined otherwise, all technical and scientific terms used herein have the same meaning as commonly understood by one of ordinary skill in the art to which this invention belongs. Although any methods and materials similar or equivalent to those described herein can also be used in the practice or testing of the present invention, representative illustrative methods and materials are now described.

[0058] Where a range of values is provided, it is understood that each intervening value, to the tenth of the unit of the lower limit unless the context clearly dictates otherwise, between the upper and lower limit of that range and any other stated or intervening value in that stated range, is encompassed within the invention. The upper and lower limits of these smaller ranges may independently be included in the smaller ranges and are also encompassed within the invention, subject to any specifically excluded limit in the stated range. Where the stated range includes one or both of the limits, ranges excluding either or both of those included limits are also included in the invention.

[0059] As used in the specification and claims, the singular form “a,” “an” and “the” include singular and plural references unless the context clearly dictates otherwise.

[0060] As used herein, the term “comprising” is intended to mean that the compositions and methods include the recited elements, but not excluding others. “Consisting essentially of” when used to define compositions and methods, shall mean excluding other elements of any essential significance to the composition or method. “Consisting of” shall mean excluding more than trace elements of other ingredients for claimed compositions and substantial method steps. Embodiments defined by each of these transition terms are within the scope of this disclosure. Accordingly, it is intended that the methods and compositions can include additional steps and components (comprising) or alternatively including steps and compositions of no significance (consisting essentially of) or alternatively, intending only the stated method steps or compositions (consisting of).

[0061] As used herein, “about” means plus or minus 10% as well as the specified number. For example, “about 10” should be understood as both “10” and “9-11.”

[0062] As used herein, “optional” or “optionally” means that the subsequently described event or circumstance may or may not occur, and that the description includes instances where said event or circumstance occurs and instances where it does not.

[0063] As used here, “activated group” means a chemical moiety with a high reactivity toward a particular chemical functional group, sometimes called a “reactive group” or a “reactive end,” under particular conditions. Examples of activated groups include phosphoramidite groups, which are known to be highly reactive toward nucleophiles, for instance in the form of unprotected hydroxyl groups, in the presence of weak acids. Phosphoramidite groups are well-known, for example, in solid-phase oligonucleotide synthesis. A phosphoramidite group allowed to react with a nucleophile of another moiety under weakly acidic conditions will displace the secondary amine substituent in favor of a bond between the nucleophile and the phosphorus atom of the phosphoramidite group. An example of a phosphoramidite group in some embodiments here is represented by the following structure, i.e., cyanoethoxy N,N-diisopropylphoramidite:

[chemical structure]

[0064] As used here, “linker” means a chemical moiety that connects two other chemical moieties. For the purposes of the present disclosure, one end of a linker may be attached to an oligonucleotide, while the other end is attached to a targeting moiety (e.g., a phosphorus atom between the oligonucleotide and a conjugated moiety).

[0065] The terms “individual,” “subject,” and “patient” are used interchangeably herein, and refer to any individual mammal, e.g., bovine, canine, feline, equine, simian, porcine, camelid, bat, or human, being treated according to the disclosed methods or uses. In preferred embodiments, the subject is a human.

[0066] As used herein, the phrases “effective amount,” “therapeutically effective amount,” and “therapeutic level” mean the ASO dosage or concentration in a subject that provides the specific pharmacological effect for which the ASO is administered in a subject in need of such treatment, i.e. to treat or prevent a coronavirus infection (e.g., MERS, SARS, or COVID-19). It is emphasized that a therapeutically effective amount or therapeutic level of an ASO will not always be effective in treating the infections described herein, even though such dosage is deemed to be a therapeutically effective amount by those of skill in the art. For convenience only, exemplary dosages, drug delivery amounts, therapeutically effective amounts, and therapeutic levels are provided below. Those skilled in the art can adjust such the amount in accordance with standard practices as needed to treat a specific subject and/or condition. The therapeutically effective amount may vary based on the route of administration and dosage form, the age and weight of the subject, and/or the subject's condition, including the type and severity of the coronavirus infection.

[0067] The terms “treatment” or “treating” as used herein with reference to a coronavirus infections refer to reducing or eliminating viral load and/or improving or ameliorating one or more symptoms of an infection such as cough, shortness of breath, body aches, chills, and/or fever.

[0068] The terms “prevent” or “preventing” as used herein with reference to a coronavirus infections refer to precluding an infection from developing in a subject exposed to a coronavirus and/or avoiding the development of one or more symptoms of an infection such as cough, shortness of breath, body aches, chills, and/or fever. “Prevention” may occur when the viral load is never allowed to exceed beyond a threshold level at which point the subject begins to feel sick or exhibit symptoms. “Prevention” may also, in some embodiments, refer to the prevention of a subsequent infection once an initial infection has been treated or cured.

[0069] As used herein, the term “pharmaceutical composition” refers to the combination of an active agent with a carrier, inert or active, making the composition especially suitable for diagnostic or therapeutic use in vivo or ex vivo.

[0070] As used herein, the term “pharmaceutically acceptable carrier” refers to any of the standard pharmaceutical carriers, such as a phosphate buffered saline solution, water, emulsions (e.g., such as an oil/water or water/oil emulsions), and various types of wetting agents. The compositions also can include stabilizers and preservatives. For examples of carriers, stabilizers and adjuvants, see, for example, Martin, Remington's Pharmaceutical Sciences, 15th Ed., Mack Publ. Co., Easton, Pa. [1975].

[0071] The phrases “parenteral administration” and “administered parenterally” as used herein means modes of administration other than enteral and topical administration, usually by injection, and includes, without limitation, intravenous, intramuscular, intraarterial, intrathecal, intracapsular, intraorbital, intracardiac, intradermal, intraperitoneal, transtracheal, subcutaneous, subcuticular, intraarticular, subcapsular, subarachnoid, intraspinal and intrasternal injection and infusion.

[0072] The phrases “systemic administration,” “administered systemically,” “peripheral administration” and “administered peripherally” as used herein mean the administration of a compound, drug or other material other than directly into the central nervous system, such that it enters the patient's system and, thus, is subject to metabolism and other like processes, for example, subcutaneous administration.

[0073] The target gene may be any gene in a cell or virus. Here, “target gene” and “target sequence” are used synonymously.

[0074] Here, “conjugation moiety” and “target moiety” or “targeting moiety” are used synonymously.

[0075] As used herein, the term “nucleotide unit” refers to an individual unit of an ASO including, but not limited to, a nucleotide, a nucleoside, a modified nucleotide, or a locked nucleotide.

[0076] As used herein, the term “nucleobase” refers to a nitrogen-containing biological compound that forms a nucleoside. Examples of nucleobases include, but are not limited to, thymine, uracil, adenine, cytosine, guanine, aryl, heteroaryl, and an analogue or derivative thereof.

[0077] As used herein, “modified nucleotide” includes any nucleic acid or nucleic acid analogue residue that contains a modification or substitution in the chemical structure of an unmodified nucleotide base, sugar (including, but not limited to, 2′-substitution), or phosphate (including, but not limited to, alternate internucleotide linkers, such as phosphorothioates or the substitution of bridging oxygens in phosphate linkers with bridging sulfurs), or a combination thereof. Non-limiting examples of modified nucleotides are shown herein.

[0078] For the purposes of the present disclosure, a DNA sequence that replaces all the U residues of an RNA sequence with T residues is “identical” to the RNA sequence, and vice versa. Accordingly, a sequence that is “identical to an RNA corresponding to” a DNA sequence constitutes the DNA sequence with all T replaced by U.

[0079] Throughout the description, where compositions are described as having, including, or comprising specific components, or where processes and methods are described as having, including, or comprising specific steps, it is contemplated that, additionally, there are compositions of the present disclosure that consist essentially of, or consist of, the recited components, and that there are processes and methods according to the present disclosure that consist essentially of, or consist of, the recited processing steps.

[0080] As a general matter, compositions specifying a percentage are by weight unless otherwise specified. Further, if a variable is not accompanied by a definition, then the previous definition of the variable controls.

### Coronaviruses and Coronavirus Infections

[0081] The antisense oligonucleotide (ASO) molecules and compositions described herein may be administered to a subject to treat or prevent a disease in a subject in need thereof, in particular when the disease is a viral infection, such as a coronavirus infection. Further disclosed herein are uses of any of the ASO molecules or compositions disclosed herein in the manufacture of a medicament for treating or preventing a viral infection, such as a coronavirus infection.

[0082] In some embodiments of the disclosed method and uses, the disease being treated is a viral disease. In some embodiments, the viral disease is caused by an RNA virus. In some embodiments, the RNA virus is a single-stranded RNA virus (ssRNA virus). In some embodiments, the ssRNA virus is a positive-sense single-stranded RNA virus ((+)ssRNA virus). In some embodiments, the (+)ssRNA virus is a coronavirus.

[0083] Coronaviruses are a family of viruses (i.e., the coronaviridae family) that cause respiratory infections in mammals and that comprise a genome that is roughly 30 kilobases in length. The coronaviridae family is divided into four genera and the genome encodes 28 proteins across multiple open reading frames, including 16 non-structural proteins (nsp) that are post-translationally cleaved from a polyprotein (see FIG. 1).

[0084] The coronaviridae family includes both α-coronaviruses or β-coronaviruses, which both mainly infect bats, but can also infect other mammals like humans, camels, and rabbits. β-coronaviruses have, to date, been of greater clinical importance, having caused epidemics including severe acute respiratory syndrome (SARS), Middle East respiratory syndrome (MERS), and COVID-19. Other disease-causing β-coronaviruses include OC44, and HKU1. Non-limiting examples of disease-causing α-coronaviruses include, but are not limited to, 229E and NL63.

[0085] In some embodiments, the coronavirus is a β-coronaviruses. In some embodiments, the β-coronaviruses is selected from the group consisting of severe acute respiratory syndrome coronavirus 2 (SARS-CoV-2) (also known by the provisional name 2019 novel coronavirus, or 2019-nCoV), human coronavirus OC43 (hCoV-OC43), Middle East respiratory syndrome-related coronavirus (MERS-CoV, also known by the provisional name 2012 novel coronavirus, or 2012-nCoV), and severe acute respiratory syndrome-related coronavirus (SARS-CoV, also known as SARS-CoV-1). In some embodiments, the β-coronaviruses is SARS-CoV-2, the causative agent of COVID-19.

[0086] As shown in FIGS. 2 and 3, several disease-causing coronaviruses share a high degree of homology in the regions of the genome encoding non-structural proteins (nsp), and more specifically, in the region encoding nsp8-nsp15. Indeed, there is roughly 65% identity across the roughly 7 kB sequence of β-coronaviruses from about nucleotide 12900 to about nucleotide 19900 of 2019-nCoV, and some subsections of the genomic span of nsp8 to nsp15 may comprise 95% or more identity. All of the genes in this region encode non-structural proteins associated with replication. Accordingly, this segment of the genome is suitable for targeting with an ASO that can provide a broad spectrum treatment for multiple different types of coronavirus, such as MERS-CoV, SARS-CoV-1, and SARS-CoV-2.

[0087] Without wishing to be bound by theory, upon entry into a cell, any of the ASO molecules disclosed herein may interact with proteins in the cell to form a RNA-Induced Silencing Complex (RISC). Once the ASO is part of the RISC, the ASO may bind to a complementary messenger RNA (mRNA) from the virus, which results in silencing of the gene that encodes the mRNA.

[0088] In some embodiments, the target gene is a viral gene. In some embodiments, the viral gene is from an RNA virus. In some embodiments, the RNA virus is a single-stranded RNA virus (ssRNA virus). In some embodiments, the ssRNA virus is a positive-sense single-stranded RNA virus ((+)ssRNA virus). In some embodiments, the (+)ssRNA virus is a coronavirus. In some embodiments, the coronavirus is a β-coronaviruses. In some embodiments, the β-coronaviruses is severe acute respiratory syndrome coronavirus 2 (SARS-CoV-2) (also known by the provisional name 2019 novel coronavirus, or 2019-nCoV), human coronavirus OC43 (hCoV-OC43), Middle East respiratory syndrome-related coronavirus (MERS-CoV, also known by the provisional name 2012 novel coronavirus, or 2012-nCoV), severe acute respiratory syndrome-related coronavirus (SARS-CoV, also known as SARS-CoV-1). In some embodiments, the β-coronaviruses is SARS-CoV-2.

[0089] In some embodiments, the target gene is selected from genome of SARS-CoV-2. In some embodiments, SARS-CoV-2 has a genome sequence shown in the nucleotide sequence of SEQ ID NO: 2407, which corresponds to the nucleotide sequence of GenBank Accession No. NC_045512.2, which is incorporated by reference in its entirety.

[0090] In some embodiments, the target gene is selected from genome of SARS-CoV. In some embodiments, SARS-CoV has a genome sequence shown in the nucleotide sequence of SEQ ID NO: 2408, which corresponds to the nucleotide sequence of GenBank Accession No. NC 004718.3, which is incorporated by reference in its entirety.

[0091] In some embodiments, the target gene is selected from the genome of MERS-CoV. In some embodiments, MERS-CoV has a genome sequence shown in the nucleotide sequence of SEQ ID NO: 2409, which corresponds to the nucleotide sequence of GenBank Accession No. NC_019843.3, which is incorporated by reference in its entirety.

[0092] In some embodiments, the target gene is selected from the genome of hCoV-OC43. In some embodiments, hCoV-OC43 has a genome sequence shown in the nucleotide sequence of SEQ ID NO: 2410, which corresponds to the nucleotide sequence of GenBank Accession No. NC_006213.1, which is incorporated by reference in its entirety.

### Antisense Oligonucleotide (ASO) Molecules

[0093] Compounds of the present disclosure include modified antisense oligonucleotides (ASOs). In some embodiments, the ASO comprises 8-22 nucleotide units, e.g., 8, 9, 10, 11, 12, 13, 14, 15, 16, 17, 18, 19, 20, 21, or 22 nucleotide units. In some embodiments, the ASO is a gapmer ASO that comprises three regions: a 5′-wing region (A′) comprising modified nucleotides; a central region (B′) comprising nucleotides of a different type from the wings, e.g., nucleotides capable of inducing RNase H cleavage; and a 3′-wing region (C′) comprising modified nucleotides.

[0094] In some embodiments, the 5′-wing region and the 3′-wing region comprise 2-6 nucleotides, e.g., 2, 3, 4, 5, or 6 nucleotides. One or more of these nucleotides is modified (e.g., 1, 2, 3, 4, 5, or 6 of the nucleotides is modified). In some embodiments, the central region may comprise 6 or more contiguous DNA nucleosides, linked by phosphodiester or thiophosphate (“ps”) internucleotide linkages. In some embodiments, the central region includes one or more modified nucleotide. For example, the central region may include one or more modified nucleotide where the central region is capable of inducing RNase H cleavage. In some embodiments, the central region includes one or more modified nucleotide having a modified nucleobase. In some embodiments, the central region comprises 3, 4, 5, 6, 7, 8, 9, 10, or 11 contiguous DNA nucleosides. In some embodiments, 1, 2, 3, 4, 5, 6, 7, 8, 9, 10, or 11 of the DNA nucleosides in the central region are modified.

[0095] Thus, in some aspects, the gapmer ASO compounds of the disclosure include compounds of formula (I):

A′-B′-C′,

wherein A′ and C′ each independently comprise 2-6 nucleotides, with one or more being a modified nucleotide, B′ comprises 6 or more contiguous DNA nucleosides linked by phosphodiester or thiophosphate internucleotide linkages. In some embodiments, A′ and C′ comprise the same number of nucleotides and/or nucleosides. In some embodiments, A′ and C′ comprise different numbers of nucleotides and/or nucleosides. In some embodiments, B′ comprises one or more modified DNA nucleosides. In some embodiments, the modified nucleotide is selected from locked nucleosides or 2′-substituted nucleosides. In some embodiments, the modified DNA nucleoside is selected from locked nucleosides or 2′-substituted nucleosides.

[0096] In some embodiments, the number of nucleotides and/or nucleosides in A′, B′, and C′ are selected from the following group (A′:B′:C′): (2:10:2), (2:10:3), (2:10:4), (2:10:5), (3:10:2), (3:10:3), (3:10:4), (3:10:5), (4:10:2), (4:10:3), (4:10:4), (4:10:5), (5:10:2), (5:10:3), (5:10:4), (5:10:5), (2:9:2), (2:9:3), (2:9:4), (2:9:5), (3:9:2), (3:9:3), (3:9:4), (3:9:5), (4:9:2), (4:9:3), (4:9:4), (4:9:5), (5:9:2), (5:9:3), (5:9:4), (5:9:5), (2:8:2), (2:8:3), (2:8:4), (2:8:5), (3:8:2), (3:8:3), (3:8:4), (3:8:5), (4:8:2), (4:8:3), (4:8:4), (4:8:5), (5:8:2), (5:8:3), (5:8:4), (5:8:5), (2:7:2), (2:7:3), (2:7:4), (2:7:5), (3:7:2), (3:7:3), (3:7:4), (3:7:5), (4:7:2), (4:7:3), (4:7:4), (4:7:5), (5:7:2), (5:7:3), (5:7:4), (5:7:5), (2:6:2), (2:6:3), (2:6:4), (2:6:5), (3:6:2), (3:6:3), (3:6:4), (3:6:5), (4:6:2), (4:6:3), (4:6:4), (4:6:5), (5:6:2), (5:6:3), (5:6:4), or (5:6:5).

[0097] In some embodiments, the 5′-wing region (A′) comprises one or more locked nucleosides or 2′-substituted nucleosides. In some embodiments, the 3′-wing region (C′) comprises one or more locked nucleosides or 2′-substituted nucleosides. In some embodiments, the central region comprises one or more locked nucleosides or 2′-substituted nucleosides. The locked nucleoside can contain a bridge between the 4′ and the 2′ position of the sugar wherein the bridges comprises 2 to 4 optionally substituted atoms. For example, a locked nucleic acid (LNA) is:

[chemical structure]

[0098] Other exemplary locked nucleosides include the following:

[chemical structure]

where R is H or alkyl (or AmNA(N-Me)) when R is alkyl);

[chemical structure]

[0099] In some embodiments, all nucleosides in the 5′-wing region (A′) are locked nucleosides. In some embodiments, all nucleosides in the 3′-wing region (C′) are locked nucleosides. In some embodiments, the 3′-wing region comprises LNA and one or two nucleosides selected from ScpBNA, AmNA, and GuNA. In some embodiments, 5′-wing region are all LNA and the 3′-wing region contains LNA and one or two nucleosides selected from ScpBNA, AmNA, and GuNA. Other suitable nucleotides are included in PCT/JP2010/068409, PCT/JP2013/075370, PCT/JP2015/054308, PCT/JP2018/006061, and/or PCT/JP2018/006062, which are incorporated by reference in their entirety.

[0100] In some embodiments, one or more of the nucleotides in the 5′-wing region (A′) and/or the 3′-wing region (C′) comprises a thiophosphate internucleotide linkage. In certain embodiments, all nucleotides in the 5′-wing region (A′) comprises a thiophosphate internucleotide linkage. In some embodiments, the 5′-wing region of an ASO comprises 2 to 6 phosphorothioate-linked locked nucleosides. In some embodiments, the 5′-wing region comprises 2 to 6 phosphorothioate-linked 2′ substituted nucleosides. In some embodiments, the 5′-wing region comprises at least one locked nucleoside and at least one 2′ substituted nucleoside, wherein the locked nucleoside and the 2′ substituted nucleoside are linked by a phosphorothiate linker. In some embodiments, the 5′-wing region further comprises a RNA nucleoside or DNA nucleoside, wherein the RNA nucleoside and DNA nucleoside are not locked nucleosides or 2′-substituted nucleosides. In some embodiments, at least two nucleosides of the 5′-wing region are linked by a phosphorothioate linker. In some embodiments, at least 2, 3, 4, 5, or 6 nucleosides of the 5′-wing region are linked by a phosphorothioate linker.

[0101] In some embodiments, all nucleotides in the 3′-wing region (C′) comprise a thiophosphate internucleotide linkage. In some embodiments, the 3′-wing region of an ASO comprises 2 to 6 phosphorothioate-linked locked nucleosides. In some embodiments, the 3′-wing region comprises 2 to 6 2′ phosphorothioate-linked substituted nucleosides. In some embodiments, the 3′-wing region comprises at least one locked nucleoside and at least one 2′ substituted nucleoside, wherein the locked nucleoside and the 2′ substituted nucleoside are linked by a phosphorothiate linker. In some embodiments, the 3′-wing region further comprises a RNA nucleoside or DNA nucleoside, wherein the RNA nucleoside and DNA nucleoside are not locked nucleosides or 2′-substituted nucleosides. In some embodiments, at least two nucleosides of the 3′-wing region are linked by a phosphorothioate linker. In some embodiments, at least 2, 3, 4, 5, or 6 nucleosides of the 3′-wing region are linked by a phosphorothioate linker.

[0102] Suitable 2′-substituted nucleosides include, but are not limited to, 2′-O-methoxy nucleotides (e.g., mA, mU, mG, mC, etc.), 2′-O-methoxyethylribose nucleosides (e.g., moeA, moeT, moeG, etc.), and 5-methyl (5m) nucleotides (e.g., (5m)C, moe(5m)C, etc.). The disclosed ASOs may comprise 1, 2, 3, 4, 5, 6, 7, 8, 9, 10, 11, 12, 13, 14, 15, 16, 17, 18, 19, or 20 2′-substituted nucleosides, for example, the ASO may comprise 1 to 10, 2 to 10, 5 to 10, 6 to 10, 1 to 12, 2 to 12, 5 to 12, 6 to 12, 1 to 15, 5 to 15, or 10 to 15 2′-substituted nucleosides (e.g., 2′-O-methoxy nucleotides and/or 2′-O-methoxyethylribose nucleosides).

[0103] In some embodiments, one or more of the nucleotides in the 5′-wing region and/or the 3′-wing region comprises a thiophosphate internucleotide linkage. In some embodiments, all nucleotides in the 5′-wing region comprises a thiophosphate internucleotide linkage. In some embodiments, all nucleotides in the 3′-wing region comprises a thiophosphate internucleotide linkage.

[0104] In some embodiments, the central region includes one or more modified nucleotide having a modified nucleobase. For example, the central region can include one or more modified nucleotide having a protected or unprotected version of the following:

[chemical structure]

where R is a halogen or R′—C≡C—; and R′ is C₆₋₁₂ aryl, 5- to 12-membered heteroaryl, hydroxy-C₁₋₆ alkyl, or C₁₋₇ alkanoyloxy. In some embodiments, the central region includes one modified nucleotide (e.g., (2s)T or (5OH)C) at the 1^{st}, 2^{nd}, 3^{rd} or 4^{th} gap nucleoside position (from the 5′ end). In some embodiments, the modified nucleotide is at the 3^{rd} gap nucleoside position (from the 5′ end). In some embodiments, the modified nucleotide is a nucleotide having the structure of:

[chemical structure]

wherein:
W is independently O, N, or S;
R₁, R₂, and R₅ are independently H or D or CH₃ or CD₃;

### R₃ is H or F;

[0105] R₄ is F or OCH₃ or OCD₃; and

### Base is

[chemical structure]

wherein:
R is a halogen or R′—C≡C—; and
R′ represents C₆₋₁₂ aryl, 5- to 12-membered heteroaryl, hydroxy-C₁₋₆ alkyl, or C₁₋₇ alkanoyloxy.
In some embodiments, C₁₋₇ alkanoyl includes, but is not limited to. formyl, acetyl, ethyl carbonyl, n-propyl carbonyl, isopropyl carbonyl, n-butyl carbonyl, isobutyl carbonyl, t-butyl carbonyl, n-pentyl carbonyl, and n-hexyl carbonyl. Other modified nucleotides include those in PCT/JP2018/006061, which is incorporated by reference in its entirety.

[0107] As used herein, unless otherwise indicated, “aryl” refers to a carbocyclic (all carbon) ring that has a fully delocalized pi-electron system. The “aryl” group can be made up of two or more fused rings (rings that share two adjacent carbon atoms). When the aryl is a fused ring system, then the ring that is connected to the rest of the molecule has a fully delocalized pi-electron system. The other ring(s) in the fused ring system may or may not have a fully delocalized pi-electron system. Examples of aryl groups include, without limitation, the radicals of benzene, naphthalene and azulene.

[0108] As used herein, unless otherwise indicated, “heteroaryl” refers to a ring that has a fully delocalized pi-electron system and contains one or more heteroatoms (e.g., one to three heteroatoms, or one to four heteroatoms, or one to five heteroatoms) independently selected from the group consisting of nitrogen, oxygen, and sulfur in the ring. The “heteroaryl” group can be made up of two or more fused rings (rings that share two adjacent carbon atoms). When the heteroaryl is a fused ring system, then the ring that is connected to the rest of the molecule has a fully delocalized pi-electron system. The other ring(s) in the fused ring system may or may not have a fully delocalized pi-electron system. Examples of heteroaryl rings include, without limitation, furan, thiophene, pyrrole, oxazole, thiazole, imidazole, pyrazole, isoxazole, isothiazole, triazole, thiadiazole, pyridine, pyridazine, pyrimidine, pyrazine and triazine.

[0109] In some embodiments, the central region of an ASO comprises at least 5 contiguous phosphorothioate-linked DNA nucleosides. In some embodiments, at least 2, 3, 4, 5, or 6 nucleosides of the central region are linked by a phosphorothioate linker. In some embodiments, a DNA nucleoside of central region is linked to a nucleoside of a 5′-wing region by a phosphorothioate linker. In some embodiments, a DNA nucleoside of central region is linked to a nucleoside of a 3′-wing region by a phosphorothioate linker. In some embodiments, the central region comprises 8 to 10 contiguous phosphorothioate-linked DNA nucleosides.

[0110] In some embodiments, the ASO is complementary or hybridizes to a viral target RNA sequence (i.e., a sequence of a SARS-CoV-2 genome) that comprises, consists of, or consists essentially of at least 5, 6, 7, 8, 9, 10, 11, 12, 13, 14, or 15 contiguous nucleotides within any one of SEQ ID NOs: 5535-5538. In some embodiments, the ASO is complementary or hybridizes to a viral target RNA sequence that comprises, consists of, or consists essentially of 5 to 15, 5 to 14, 5 to 13, 5 to 12, 5 to 11, 5 to 10, 5 to 9, 5 to 8, 6 to 15, 6 to 14, 6 to 13, 6 to 12, 6 to 11, 6 to 10, 7 to 15, 7 to 14, 7 to 13, 7 to 12, or 7 to 11 contiguous nucleotides within any one of SEQ ID NOs: 5535-5538. In some embodiments, the ASO is perfectly complementary to the viral target RNA sequence. In some embodiments, there is less than or equal to 5, 4, 3, 2, or 1 mismatches between the ASO and the viral target sequence. In some embodiments, there is less than or equal to 2 mismatches between the ASO and the viral target sequence. In some embodiments, there is less than or equal to 1 mismatch between the ASO and the viral target sequence. In some embodiments, the mismatch is in the wing region of the ASO. In some embodiments, the mismatch is in the 5′ wing region of the ASO. In some embodiments, the mismatch is in the 3′ wing region of the ASO. In some embodiments, the mismatch is in the central region of the ASO.

[0111] In some embodiments, the central region is complementary or hybridizes to a viral target RNA sequence that comprises, consists of, or consists essentially of at least 5, 6, 7, 8, 9, 10, 11, 12, 13, 14, or 15 contiguous nucleotides within any one of SEQ ID NOs: 5535-5538. In some embodiments, the central region is complementary or hybridizes to a viral target RNA sequence that comprises, consists of, or consists essentially of 5 to 15, 5 to 14, 5 to 13, 5 to 12, 5 to 11, 5 to 10, 5 to 9, 5 to 8, 6 to 15, 6 to 14, 6 to 13, 6 to 12, 6 to 11, 6 to 10, 7 to 15, 7 to 14, 7 to 13, 7 to 12, or 7 to 11 contiguous nucleotides within any one of SEQ ID NOs: 5535-5538. In some embodiments, the central region is perfectly complementary to the viral target RNA sequence. In some embodiments, there is less than or equal to 5, 4, 3, 2, or 1 mismatches between the central region and the viral target sequence. In some embodiments, there is less than or equal to 2 mismatches between the central region and the viral target sequence. In some embodiments, there is less than or equal to 1 mismatch between the central region and the viral target sequence.

[0112] The coronavidae family of viruses comprises four genera and the genome of these viruses encodes 16 non-structural proteins and 12 structural or accessory proteins, for a total of 28 total proteins across multiple different open reading frames (see, e.g., FIG. 1). In some embodiments, the ASO is complementary or hybridizes to a viral target RNA sequence is complementary or hybridizes to a viral target RNA sequence that begins in a region encoding a non-structural protein (nsp), such as leader protein, nsp2, nsp3, nsp4, nsp5, nsp6, nsp7, nsp8, nsp9, nsp10, nsp11, nsp12, nsp13, nsp14, nsp15, or nsp16. In some embodiments, the viral target RNA sequence may preferably begin in a region encoding nsp8, nsp9, nsp10, nsp11, nsp12, nsp13, nsp14, or nsp15. In some embodiments, the ASO is complementary or hybridizes to a viral target RNA sequence that begins in a region encoding a structural or accessory protein, such as an S region, an E region, an M region, or an N region of a coronavirus. In some embodiments, the viral target is a region of the coronavirus genome that share substantial homology across multiple members of the coronavirus family (see, e.g., FIG. 2). Table 2 at the end of the Detailed Description Section provides exemplary coronavirus genomes from which homologous target regions can be established.

[0113] In some embodiments, the viral target may, e.g., begin at the 5′-end of target-site in GenBank Accession NC_045512.2, or in any other region of homology shared between the coronavirus genomes disclosed in Table 2 In some embodiments, the ASO directed to a coronavirus target region may comprise 8, 9, 10, 11, 12, 13, 14, 15, or 16 nucleotides/nucleosides of any one of the sequences disclosed in Table 1 or a complement thereof. Any of the nucleotide/nucleosides in an ASO comprising 8, 9, 10, 11, 12, 13, 14, 15, or 16 nucleotides/nucleosides of a sequence disclosed in Table 1 or a complement thereof may be modified, locked, conjugated or linked, as further described herein. In other words, any of the sequences disclosed in Table 1 may, in some embodiments, comprise one or more modified, locked, conjugated or linked nucleotides/nucleosides in addition to or in place of the nucleotides/nucleosides disclosed in SEQ ID NOs: 1-5534. For example, any one of SEQ ID NOs: 1-5534 may comprise one or more locked nucleic acid (LNA) A; (5m)lnC=locked nucleic acid (LNA)-5methyl C; lnG=locked nucleic acid (LNA) G; lnT=locked nucleic acid (LNA) T; (5m)C=5 methylC; mA=2-O-methoxy A; mU=2-O-methoxy U; (8nh)A=8-amino A; (8nh)G=8-amino G; (2s)T=2-thio T; (5-OH)C=5-hydroxy C; cp=scp=cyclopropyl; cp (5m)C=scp (5m) C=cyclopropyl (5m) C; cpG=scpG=cyclopropyl G; cpT=scpT=cyclopropyl T; or ps=phosphorothioate linkages.

TABLE 1
Exemplary ASO Sequences

| SEQ | | | | | |
|---|---|---|---|---|---|
| ID | | | Polarity to | Start on | End on |
| NO: | Oligo sequence | Target | target | target | target |
| 1 | GTCAACGACAGTAATT | NC_045512.2 | 3′→5′ | 142 | 157 |
| 2 | TGTCAACGACAGTAAT | NC_045512.2 | 3′→5′ | 143 | 158 |
| 3 | ACGAAACCGTAAGCAG | NC_045512.2 | 3′→5′ | 190 | 205 |
| 4 | GACGAAACCGTAAGCA | NC_045512.2 | 3′→5′ | 191 | 206 |
| 5 | GGACGAAACCGTAAGC | NC_045512.2 | 3′→5′ | 192 | 207 |
| 6 | CGGACGAAACCGTAAG | NC_045512.2 | 3′→5′ | 193 | 208 |
| 7 | ACGGACGAAACCGTAA | NC_045512.2 | 3′→5′ | 194 | 209 |
| 8 | CACGGACGAAACCGTA | NC_045512.2 | 3′→5′ | 195 | 210 |
| 9 | ACACGGACGAAACCGT | NC_045512.2 | 3′→5′ | 196 | 211 |
| 10 | AACACGGACGAAACCG | NC_045512.2 | 3′→5′ | 197 | 212 |
| 11 | CAACACGGACGAAACC | NC_045512.2 | 3′→5′ | 198 | 213 |
| 12 | GCAACACGGACGAAAC | NC_045512.2 | 3′→5′ | 199 | 214 |
| 13 | TGCAACACGGACGAAA | NC_045512.2 | 3′→5′ | 200 | 215 |
| 14 | CTGCAACACGGACGAA | NC_045512.2 | 3′→5′ | 201 | 216 |
| 15 | CCCGGACGAAACCTAG | NC_045512.2 | 3′→5′ | 233 | 248 |
| 16 | ACCCGGACGAAACCTA | NC_045512.2 | 3′→5′ | 234 | 249 |
| 17 | CACCCGGACGAAACCT | NC_045512.2 | 3′→5′ | 235 | 250 |
| 18 | ACACCCGGACGAAACC | NC_045512.2 | 3′→5′ | 236 | 251 |
| 19 | CACACCCGGACGAAAC | NC_045512.2 | 3′→5′ | 237 | 252 |
| 20 | TCACACCCGGACGAAA | NC_045512.2 | 3′→5′ | 238 | 253 |
| 21 | GTCACACCCGGACGAA | NC_045512.2 | 3′→5′ | 239 | 254 |
| 22 | GGTCACACCCGGACGA | NC_045512.2 | 3′→5′ | 240 | 255 |
| 23 | CGGTCACACCCGGACG | NC_045512.2 | 3′→5′ | 241 | 256 |
| 24 | TCGGTCACACCCGGAC | NC_045512.2 | 3′→5′ | 242 | 257 |
| 25 | TTCGGTCACACCCGGA | NC_045512.2 | 3′→5′ | 243 | 258 |
| 26 | TTTCGGTCACACCCGG | NC_045512.2 | 3′→5′ | 244 | 259 |
| 27 | CTTTCGGTCACACCCG | NC_045512.2 | 3′→5′ | 245 | 260 |
| 28 | CCTTTCGGTCACACCC | NC_045512.2 | 3′→5′ | 246 | 261 |
| 29 | ACCTTTCGGTCACACC | NC_045512.2 | 3′→5′ | 247 | 262 |
| 30 | TACCTTTCGGTCACAC | NC_045512.2 | 3′→5′ | 248 | 263 |
| 31 | TTACCTTTCGGTCACA | NC_045512.2 | 3′→5′ | 249 | 264 |
| 32 | CTTACCTTTCGGTCAC | NC_045512.2 | 3′→5′ | 250 | 265 |
| 33 | TCTTACCTTTCGGTCA | NC_045512.2 | 3′→5′ | 251 | 266 |
| 34 | ATCTTACCTTTCGGTC | NC_045512.2 | 3′→5′ | 252 | 267 |
| 35 | CATCTTACCTTTCGGT | NC_045512.2 | 3′→5′ | 253 | 268 |
| 36 | CCATCTTACCTTTCGG | NC_045512.2 | 3′→5′ | 254 | 269 |
| 37 | TCCATCTTACCTTTCG | NC_045512.2 | 3′→5′ | 255 | 270 |
| 38 | CTCCATCTTACCTTTC | NC_045512.2 | 3′→5′ | 256 | 271 |
| 39 | TCTCCATCTTACCTTT | NC_045512.2 | 3′→5′ | 257 | 272 |
| 40 | CTCTCCATCTTACCTT | NC_045512.2 | 3′→5′ | 258 | 273 |
| 41 | GCTCTCCATCTTACCT | NC_045512.2 | 3′→5′ | 259 | 274 |
| 42 | GGCTCTCCATCTTACC | NC_045512.2 | 3′→5′ | 260 | 275 |
| 43 | AGGCTCTCCATCTTAC | NC_045512.2 | 3′→5′ | 261 | 276 |
| 44 | AAGGCTCTCCATCTTA | NC_045512.2 | 3′→5′ | 262 | 277 |
| 45 | CAAGGCTCTCCATCTT | NC_045512.2 | 3′→5′ | 263 | 278 |
| 46 | ACAAGGCTCTCCATCT | NC_045512.2 | 3′→5′ | 264 | 279 |
| 47 | TGTGTTTTCTCGTTGA | NC_045512.2 | 3′→5′ | 288 | 303 |
| 48 | GTGTGTTTTCTCGTTG | NC_045512.2 | 3′→5′ | 289 | 304 |
| 49 | CGTGTGTTTTCTCGTT | NC_045512.2 | 3′→5′ | 290 | 305 |
| 50 | ACGTGTGTTTTCTCGT | NC_045512.2 | 3′→5′ | 291 | 306 |
| 51 | GACGTGTGTTTTCTCG | NC_045512.2 | 3′→5′ | 292 | 307 |
| 52 | GGACGTGTGTTTTCTC | NC_045512.2 | 3′→5′ | 293 | 308 |
| 53 | TGGACGTGTGTTTTCT | NC_045512.2 | 3′→5′ | 294 | 309 |
| 54 | TTGGACGTGTGTTTTC | NC_045512.2 | 3′→5′ | 295 | 310 |
| 55 | GTTGGACGTGTGTTTT | NC_045512.2 | 3′→5′ | 296 | 311 |
| 56 | AGTTGGACGTGTGTTT | NC_045512.2 | 3′→5′ | 297 | 312 |
| 57 | GAGTTGGACGTGTGTT | NC_045512.2 | 3′→5′ | 298 | 313 |
| 58 | TGAGTTGGACGTGTGT | NC_045512.2 | 3′→5′ | 299 | 314 |
| 59 | CTGAGTTGGACGTGTG | NC_045512.2 | 3′→5′ | 300 | 315 |
| 60 | ACTGAGTTGGACGTGT | NC_045512.2 | 3′→5′ | 301 | 316 |
| 61 | AACTGAGTTGGACGTG | NC_045512.2 | 3′→5′ | 302 | 317 |
| 62 | AAACTGAGTTGGACGT | NC_045512.2 | 3′→5′ | 303 | 318 |
| 63 | CAAACTGAGTTGGACG | NC_045512.2 | 3′→5′ | 304 | 319 |
| 64 | GCAAACTGAGTTGGAC | NC_045512.2 | 3′→5′ | 305 | 320 |
| 65 | GGCAAACTGAGTTGGA | NC_045512.2 | 3′→5′ | 306 | 321 |
| 66 | AGGCAAACTGAGTTGG | NC_045512.2 | 3′→5′ | 307 | 322 |
| 67 | CAGGCAAACTGAGTTG | NC_045512.2 | 3′→5′ | 308 | 323 |
| 68 | ACAGGCAAACTGAGTT | NC_045512.2 | 3′→5′ | 309 | 324 |
| 69 | CATAGGGCTGTTCAAG | NC_045512.2 | 3′→5′ | 455 | 470 |
| 70 | ACATAGGGCTGTTCAA | NC_045512.2 | 3′→5′ | 456 | 471 |
| 71 | CACATAGGGCTGTTCA | NC_045512.2 | 3′→5′ | 457 | 472 |
| 72 | ACACATAGGGCTGTTC | NC_045512.2 | 3′→5′ | 458 | 473 |
| 73 | AACACATAGGGCTGTT | NC_045512.2 | 3′→5′ | 459 | 474 |
| 74 | GAACACATAGGGCTGT | NC_045512.2 | 3′→5′ | 460 | 475 |
| 75 | TGAACACATAGGGCTG | NC_045512.2 | 3′→5′ | 461 | 476 |
| 76 | ATGAACACATAGGGCT | NC_045512.2 | 3′→5′ | 462 | 477 |
| 77 | TCTTACGAAGAAGAAC | NC_045512.2 | 3′→5′ | 626 | 641 |
| 78 | TTCTTACGAAGAAGAA | NC_045512.2 | 3′→5′ | 627 | 642 |
| 79 | GTTCTTACGAAGAAGA | NC_045512.2 | 3′→5′ | 628 | 643 |
| 80 | CGTTCTTACGAAGAAG | NC_045512.2 | 3′→5′ | 629 | 644 |
| 81 | CCGTTCTTACGAAGAA | NC_045512.2 | 3′→5′ | 630 | 645 |
| 82 | ACCGTTCTTACGAAGA | NC_045512.2 | 3′→5′ | 631 | 646 |
| 83 | TACCGTTCTTACGAAG | NC_045512.2 | 3′→5′ | 632 | 647 |
| 84 | TTACCGTTCTTACGAA | NC_045512.2 | 3′→5′ | 633 | 648 |
| 85 | ATTACCGTTCTTACGA | NC_045512.2 | 3′→5′ | 634 | 649 |
| 86 | TATTACCGTTCTTACG | NC_045512.2 | 3′→5′ | 635 | 650 |
| 87 | TTATTACCGTTCTTAC | NC_045512.2 | 3′→5′ | 636 | 651 |
| 88 | CAGTGCCAAGCTCGTC | NC_045512.2 | 3′→5′ | 704 | 719 |
| 89 | TCAGTGCCAAGCTCGT | NC_045512.2 | 3′→5′ | 705 | 720 |
| 90 | ATCAGTGCCAAGCTCG | NC_045512.2 | 3′→5′ | 706 | 721 |
| 91 | GATCAGTGCCAAGCTC | NC_045512.2 | 3′→5′ | 707 | 722 |
| 92 | GGATCAGTGCCAAGCT | NC_045512.2 | 3′→5′ | 708 | 723 |
| 93 | TTAGTGTTCCAGTTTT | NC_045512.2 | 3′→5′ | 741 | 756 |
| 94 | ACACACAGCCTCCAAA | NC_045512.2 | 3′→5′ | 1481 | 1496 |
| 95 | AACACACAGCCTCCAA | NC_045512.2 | 3′→5′ | 1482 | 1497 |
| 96 | AAGTTTTAAATAACCA | NC_045512.2 | 3′→5′ | 3352 | 3367 |
| 97 | TAAGTTTTAAATAACC | NC_045512.2 | 3′→5′ | 3353 | 3368 |
| 98 | GTAAGTTTTAAATAAC | NC_045512.2 | 3′→5′ | 3354 | 3369 |
| 99 | AGTAAGTTTTAAATAA | NC_045512.2 | 3′→5′ | 3355 | 3370 |
| 100 | CAGTAAGTTTTAAATA | NC_045512.2 | 3′→5′ | 3356 | 3371 |
| 101 | TCAGTAAGTTTTAAAT | NC_045512.2 | 3′→5′ | 3357 | 3372 |
| 102 | GTCAGTAAGTTTTAAA | NC_045512.2 | 3′→5′ | 3358 | 3373 |
| 103 | TGTCAGTAAGTTTTAA | NC_045512.2 | 3′→5′ | 3359 | 3374 |
| 104 | TTGTCAGTAAGTTTTA | NC_045512.2 | 3′→5′ | 3360 | 3375 |
| 105 | ATTGTCAGTAAGTTTT | NC_045512.2 | 3′→5′ | 3361 | 3376 |
| 106 | CATTGTCAGTAAGTTT | NC_045512.2 | 3′→5′ | 3362 | 3377 |
| 107 | ACATTGTCAGTAAGTT | NC_045512.2 | 3′→5′ | 3363 | 3378 |
| 108 | ACTTAGTTTCTTCCAG | NC_045512.2 | 3′→5′ | 3992 | 4007 |
| 109 | AACTTAGTTTCTTCCA | NC_045512.2 | 3′→5′ | 3993 | 4008 |
| 110 | CACAAAAGTTAGCAGC | NC_045512.2 | 3′→5′ | 5384 | 5399 |
| 111 | GCACAAAAGTTAGCAG | NC_045512.2 | 3′→5′ | 5385 | 5400 |
| 112 | TGCACAAAAGTTAGCA | NC_045512.2 | 3′→5′ | 5386 | 5401 |
| 113 | GTGCACAAAAGTTAGC | NC_045512.2 | 3′→5′ | 5387 | 5402 |
| 114 | AGTGCACAAAAGTTAG | NC_045512.2 | 3′→5′ | 5388 | 5403 |
| 115 | GACATCATAACAAAAG | NC_045512.2 | 3′→5′ | 5673 | 5688 |
| 116 | CTCCAAAGACAACGTA | NC_045512.2 | 3′→5′ | 6294 | 6309 |
| 117 | CACTACTTCTTCAGAG | NC_045512.2 | 3′→5′ | 6406 | 6421 |
| 118 | CCACTACTTCTTCAGA | NC_045512.2 | 3′→5′ | 6407 | 6422 |
| 119 | TCCACTACTTCTTCAG | NC_045512.2 | 3′→5′ | 6408 | 6423 |
| 120 | TTCCACTACTTCTTCA | NC_045512.2 | 3′→5′ | 6409 | 6424 |
| 121 | TTTCCACTACTTCTTC | NC_045512.2 | 3′→5′ | 6410 | 6425 |
| 122 | TTTTCCACTACTTCTT | NC_045512.2 | 3′→5′ | 6411 | 6426 |
| 123 | ATTTTCCACTACTTCT | NC_045512.2 | 3′→5′ | 6412 | 6427 |
| 124 | GATTTTCCACTACTTC | NC_045512.2 | 3′→5′ | 6413 | 6428 |
| 125 | GGATTTTCCACTACTT | NC_045512.2 | 3′→5′ | 6414 | 6429 |
| 126 | AGGATTTTCCACTACT | NC_045512.2 | 3′→5′ | 6415 | 6430 |
| 127 | TAGGATTTTCCACTAC | NC_045512.2 | 3′→5′ | 6416 | 6431 |
| 128 | GTAGGATTTTCCACTA | NC_045512.2 | 3′→5′ | 6417 | 6432 |
| 129 | GGTAGGATTTTCCACT | NC_045512.2 | 3′→5′ | 6418 | 6433 |
| 130 | CTTCGGTAGTTTTCAC | NC_045512.2 | 3′→5′ | 6461 | 6476 |
| 131 | ACTTCGGTAGTTTTCA | NC_045512.2 | 3′→5′ | 6462 | 6477 |
| 132 | AACTTCGGTAGTTTTC | NC_045512.2 | 3′→5′ | 6463 | 6478 |
| 133 | CAACTTCGGTAGTTTT | NC_045512.2 | 3′→5′ | 6464 | 6479 |
| 134 | ACAACTTCGGTAGTTT | NC_045512.2 | 3′→5′ | 6465 | 6480 |
| 135 | TACAACTTCGGTAGTT | NC_045512.2 | 3′→5′ | 6466 | 6481 |
| 136 | CTACAACTTCGGTAGT | NC_045512.2 | 3′→5′ | 6467 | 6482 |
| 137 | CCTACAACTTCGGTAG | NC_045512.2 | 3′→5′ | 6468 | 6483 |
| 138 | CATTAGGTTTCTTAAT | NC_045512.2 | 3′→5′ | 6584 | 6599 |
| 139 | TCATTAGGTTTCTTAA | NC_045512.2 | 3′→5′ | 6585 | 6600 |
| 140 | TAACAATAGTTGTACA | NC_045512.2 | 3′→5′ | 7532 | 7547 |
| 141 | TTAACAATAGTTGTAC | NC_045512.2 | 3′→5′ | 7533 | 7548 |
| 142 | ATTAACAATAGTTGTA | NC_045512.2 | 3′→5′ | 7534 | 7549 |
| 143 | CATTAACAATAGTTGT | NC_045512.2 | 3′→5′ | 7535 | 7550 |
| 144 | CCATTAACAATAGTTG | NC_045512.2 | 3′→5′ | 7536 | 7551 |
| 145 | TTGGTCTTTTAAACTG | NC_045512.2 | 3′→5′ | 7691 | 7706 |
| 146 | ATTGGTCTTTTAAACT | NC_045512.2 | 3′→5′ | 7692 | 7707 |
| 147 | TGTGACTTTTTGCTAC | NC_045512.2 | 3′→5′ | 8372 | 8387 |
| 148 | TTGTGACTTTTTGCTA | NC_045512.2 | 3′→5′ | 8373 | 8388 |
| 149 | GTCACGAGTGACACCA | NC_045512.2 | 3′→5′ | 8707 | 8722 |
| 150 | TGTCACGAGTGACACC | NC_045512.2 | 3′→5′ | 8708 | 8723 |
| 151 | ATGTCACGAGTGACAC | NC_045512.2 | 3′→5′ | 8709 | 8724 |
| 152 | GTCAAGTACAAGTAAA | NC_045512.2 | 3′→5′ | 9588 | 9603 |
| 153 | TGTCAAGTACAAGTAA | NC_045512.2 | 3′→5′ | 9589 | 9604 |
| 154 | ATGTCAAGTACAAGTA | NC_045512.2 | 3′→5′ | 9590 | 9605 |
| 155 | AATGTCAAGTACAAGT | NC_045512.2 | 3′→5′ | 9591 | 9606 |
| 156 | CTAAAACCACTCTGCA | NC_045512.2 | 3′→5′ | 10050 | 10065 |
| 157 | CATGTCTTGGACAGTA | NC_045512.2 | 3′→5′ | 10163 | 10178 |
| 158 | ACATGTCTTGGACAGT | NC_045512.2 | 3′→5′ | 10164 | 10179 |
| 159 | ATGGTGAACCATTGTA | NC_045512.2 | 3′→5′ | 10406 | 10421 |
| 160 | GATGGTGAACCATTGT | NC_045512.2 | 3′→5′ | 10407 | 10422 |
| 161 | CAACACTACCACATGA | NC_045512.2 | 3′→5′ | 10484 | 10499 |
| 162 | CCAACACTACCACATG | NC_045512.2 | 3′→5′ | 10485 | 10500 |
| 163 | ACCAACACTACCACAT | NC_045512.2 | 3′→5′ | 10486 | 10501 |
| 164 | AACCAACACTACCACA | NC_045512.2 | 3′→5′ | 10487 | 10502 |
| 165 | AAACCAACACTACCAC | NC_045512.2 | 3′→5′ | 10488 | 10503 |
| 166 | AAAACCAACACTACCA | NC_045512.2 | 3′→5′ | 10489 | 10504 |
| 167 | TAAAACCAACACTACC | NC_045512.2 | 3′→5′ | 10490 | 10505 |
| 168 | TTAAAACCAACACTAC | NC_045512.2 | 3′→5′ | 10491 | 10506 |
| 169 | GTTAAAACCAACACTA | NC_045512.2 | 3′→5′ | 10492 | 10507 |
| 170 | TGTTAAAACCAACACT | NC_045512.2 | 3′→5′ | 10493 | 10508 |
| 171 | ATGTTAAAACCAACAC | NC_045512.2 | 3′→5′ | 10494 | 10509 |
| 172 | GCAAGAGAAGGTAACA | NC_045512.2 | 3′→5′ | 11184 | 11199 |
| 173 | CTAAGAAACAATAAAC | NC_045512.2 | 3′→5′ | 11609 | 11624 |
| 174 | CCTAAGAAACAATAAA | NC_045512.2 | 3′→5′ | 11610 | 11625 |
| 175 | GCCTAAGAAACAATAA | NC_045512.2 | 3′→5′ | 11611 | 11626 |
| 176 | AGCCTAAGAAACAATA | NC_045512.2 | 3′→5′ | 11612 | 11627 |
| 177 | TAGCCTAAGAAACAAT | NC_045512.2 | 3′→5′ | 11613 | 11628 |
| 178 | ATAGCCTAAGAAACAA | NC_045512.2 | 3′→5′ | 11614 | 11629 |
| 179 | AATAGCCTAAGAAACA | NC_045512.2 | 3′→5′ | 11615 | 11630 |
| 180 | CATAAACACCAAGAGT | NC_045512.2 | 3′→5′ | 11684 | 11699 |
| 181 | TCATAAACACCAAGAG | NC_045512.2 | 3′→5′ | 11685 | 11700 |
| 182 | TTTTAGACTGTACAGT | NC_045512.2 | 3′→5′ | 11834 | 11849 |
| 183 | ATTTTAGACTGTACAG | NC_045512.2 | 3′→5′ | 11835 | 11850 |
| 184 | CATTTTAGACTGTACA | NC_045512.2 | 3′→5′ | 11836 | 11851 |
| 185 | ACATTTTAGACTGTAC | NC_045512.2 | 3′→5′ | 11837 | 11852 |
| 186 | GACATTTTAGACTGTA | NC_045512.2 | 3′→5′ | 11838 | 11853 |
| 187 | CAGCACCCTGCATGGA | NC_045512.2 | 3′→5′ | 12023 | 12038 |
| 188 | ACAGCACCCTGCATGG | NC_045512.2 | 3′→5′ | 12024 | 12039 |
| 189 | TACAGCACCCTGCATG | NC_045512.2 | 3′→5′ | 12025 | 12040 |
| 190 | CTACAGCACCCTGCAT | NC_045512.2 | 3′→5′ | 12026 | 12041 |
| 191 | TCTACAGCACCCTGCA | NC_045512.2 | 3′→5′ | 12027 | 12042 |
| 192 | GTCTACAGCACCCTGC | NC_045512.2 | 3′→5′ | 12028 | 12043 |
| 193 | TGTCTACAGCACCCTG | NC_045512.2 | 3′→5′ | 12029 | 12044 |
| 194 | ATGTCTACAGCACCCT | NC_045512.2 | 3′→5′ | 12030 | 12045 |
| 195 | CTTCAGAATCACCATT | NC_045512.2 | 3′→5′ | 12173 | 12188 |
| 196 | ACTTCAGAATCACCAT | NC_045512.2 | 3′→5′ | 12174 | 12189 |
| 197 | TAGCCACATTCAAAGA | NC_045512.2 | 3′→5′ | 12212 | 12227 |
| 198 | TTAGCCACATTCAAAG | NC_045512.2 | 3′→5′ | 12213 | 12228 |
| 199 | TTTAGCCACATTCAAA | NC_045512.2 | 3′→5′ | 12214 | 12229 |
| 200 | ATTTAGCCACATTCAA | NC_045512.2 | 3′→5′ | 12215 | 12230 |
| 201 | GATTTAGCCACATTCA | NC_045512.2 | 3′→5′ | 12216 | 12231 |
| 202 | AGATTTAGCCACATTC | NC_045512.2 | 3′→5′ | 12217 | 12232 |
| 203 | CAGATTTAGCCACATT | NC_045512.2 | 3′→5′ | 12218 | 12233 |
| 204 | TCAGATTTAGCCACAT | NC_045512.2 | 3′→5′ | 12219 | 12234 |
| 205 | CCATCTTTTCCAACTT | NC_045512.2 | 3′→5′ | 12263 | 12278 |
| 206 | GCCATCTTTTCCAACT | NC_045512.2 | 3′→5′ | 12264 | 12279 |
| 207 | ACATTTGGGTCATAGC | NC_045512.2 | 3′→5′ | 12287 | 12302 |
| 208 | TACATTTGGGTCATAG | NC_045512.2 | 3′→5′ | 12288 | 12303 |
| 209 | CTTTTGCCCTCTTGTC | NC_045512.2 | 3′→5′ | 12323 | 12338 |
| 210 | ACTTTTGCCCTCTTGT | NC_045512.2 | 3′→5′ | 12324 | 12339 |
| 211 | TGTTGATAATGTTGTT | NC_045512.2 | 3′→5′ | 12401 | 12416 |
| 212 | TTGTTGATAATGTTGT | NC_045512.2 | 3′→5′ | 12402 | 12417 |
| 213 | ATTGTTGATAATGTTG | NC_045512.2 | 3′→5′ | 12403 | 12418 |
| 214 | CATTGTTGATAATGTT | NC_045512.2 | 3′→5′ | 12404 | 12419 |
| 215 | GCATTGTTGATAATGT | NC_045512.2 | 3′→5′ | 12405 | 12420 |
| 216 | ACATCTGTCGTAGTGC | NC_045512.2 | 3′→5′ | 12707 | 12722 |
| 217 | GACATCTGTCGTAGTG | NC_045512.2 | 3′→5′ | 12708 | 12723 |
| 218 | CAAACCTACCTCCCTT | NC_045512.2 | 3′→5′ | 12791 | 12806 |
| 219 | ACAAACCTACCTCCCT | NC_045512.2 | 3′→5′ | 12792 | 12807 |
| 220 | GGAATCTAGCCCATTT | NC_045512.2 | 3′→5′ | 12839 | 12854 |
| 221 | GGGAATCTAGCCCATT | NC_045512.2 | 3′→5′ | 12840 | 12855 |
| 222 | AGGGAATCTAGCCCAT | NC_045512.2 | 3′→5′ | 12841 | 12856 |
| 223 | TAGGGAATCTAGCCCA | NC_045512.2 | 3′→5′ | 12842 | 12857 |
| 224 | TTAGGGAATCTAGCCC | NC_045512.2 | 3′→5′ | 12843 | 12858 |
| 225 | CTTAGGGAATCTAGCC | NC_045512.2 | 3′→5′ | 12844 | 12859 |
| 226 | TCTTAGGGAATCTAGC | NC_045512.2 | 3′→5′ | 12845 | 12860 |
| 227 | CTCTTAGGGAATCTAG | NC_045512.2 | 3′→5′ | 12846 | 12861 |
| 228 | ACTCTTAGGGAATCTA | NC_045512.2 | 3′→5′ | 12847 | 12862 |
| 229 | CACTCTTAGGGAATCT | NC_045512.2 | 3′→5′ | 12848 | 12863 |
| 230 | TCACTCTTAGGGAATC | NC_045512.2 | 3′→5′ | 12849 | 12864 |
| 231 | ATCACTCTTAGGGAAT | NC_045512.2 | 3′→5′ | 12850 | 12865 |
| 232 | CATCACTCTTAGGGAA | NC_045512.2 | 3′→5′ | 12851 | 12866 |
| 233 | CCATCACTCTTAGGGA | NC_045512.2 | 3′→5′ | 12852 | 12867 |
| 234 | GGTGGTTCCAGTTCTG | NC_045512.2 | 3′→5′ | 12885 | 12900 |
| 235 | AGGTGGTTCCAGTTCT | NC_045512.2 | 3′→5′ | 12886 | 12901 |
| 236 | AAGGTGGTTCCAGTTC | NC_045512.2 | 3′→5′ | 12887 | 12902 |
| 237 | CAAGGTGGTTCCAGTT | NC_045512.2 | 3′→5′ | 12888 | 12903 |
| 238 | ACAAGGTGGTTCCAGT | NC_045512.2 | 3′→5′ | 12889 | 12904 |
| 239 | TACAAGGTGGTTCCAG | NC_045512.2 | 3′→5′ | 12890 | 12905 |
| 240 | CTACAAGGTGGTTCCA | NC_045512.2 | 3′→5′ | 12891 | 12906 |
| 241 | CCTACAAGGTGGTTCC | NC_045512.2 | 3′→5′ | 12892 | 12907 |
| 242 | ACCTACAAGGTGGTTC | NC_045512.2 | 3′→5′ | 12893 | 12908 |
| 243 | AACCTACAAGGTGGTT | NC_045512.2 | 3′→5′ | 12894 | 12909 |
| 244 | AAACCTACAAGGTGGT | NC_045512.2 | 3′→5′ | 12895 | 12910 |
| 245 | CAAACCTACAAGGTGG | NC_045512.2 | 3′→5′ | 12896 | 12911 |
| 246 | ACAAACCTACAAGGTG | NC_045512.2 | 3′→5′ | 12897 | 12912 |
| 247 | AACAAACCTACAAGGT | NC_045512.2 | 3′→5′ | 12898 | 12913 |
| 248 | TAACAAACCTACAAGG | NC_045512.2 | 3′→5′ | 12899 | 12914 |
| 249 | GTAACAAACCTACAAG | NC_045512.2 | 3′→5′ | 12900 | 12915 |
| 250 | TGTAACAAACCTACAA | NC_045512.2 | 3′→5′ | 12901 | 12916 |
| 251 | CTGTAACAAACCTACA | NC_045512.2 | 3′→5′ | 12902 | 12917 |
| 252 | TCTGTAACAAACCTAC | NC_045512.2 | 3′→5′ | 12903 | 12918 |
| 253 | GTCTGTAACAAACCTA | NC_045512.2 | 3′→5′ | 12904 | 12919 |
| 254 | TGTCTGTAACAAACCT | NC_045512.2 | 3′→5′ | 12905 | 12920 |
| 255 | GTGTCTGTAACAAACC | NC_045512.2 | 3′→5′ | 12906 | 12921 |
| 256 | TGTGTCTGTAACAAAC | NC_045512.2 | 3′→5′ | 12907 | 12922 |
| 257 | GTGTGTCTGTAACAAA | NC_045512.2 | 3′→5′ | 12908 | 12923 |
| 258 | GGTGTGTCTGTAACAA | NC_045512.2 | 3′→5′ | 12909 | 12924 |
| 259 | CTATTTAGGTTGTTTA | NC_045512.2 | 3′→5′ | 12966 | 12981 |
| 260 | TCTATTTAGGTTGTTT | NC_045512.2 | 3′→5′ | 12967 | 12982 |
| 261 | CTCTATTTAGGTTGTT | NC_045512.2 | 3′→5′ | 12968 | 12983 |
| 262 | CCTCTATTTAGGTTGT | NC_045512.2 | 3′→5′ | 12969 | 12984 |
| 263 | ACCTCTATTTAGGTTG | NC_045512.2 | 3′→5′ | 12970 | 12985 |
| 264 | TACCTCTATTTAGGTT | NC_045512.2 | 3′→5′ | 12971 | 12986 |
| 265 | ATACCTCTATTTAGGT | NC_045512.2 | 3′→5′ | 12972 | 12987 |
| 266 | CATACCTCTATTTAGG | NC_045512.2 | 3′→5′ | 12973 | 12988 |
| 267 | CCATACCTCTATTTAG | NC_045512.2 | 3′→5′ | 12974 | 12989 |
| 268 | ACCATACCTCTATTTA | NC_045512.2 | 3′→5′ | 12975 | 12990 |
| 269 | CAGTTGAATTGGCAGG | NC_045512.2 | 3′→5′ | 13046 | 13061 |
| 270 | ACAGTTGAATTGGCAG | NC_045512.2 | 3′→5′ | 13047 | 13062 |
| 271 | GTGTACACAACATCTT | NC_045512.2 | 3′→5′ | 13151 | 13166 |
| 272 | TGTGTACACAACATCT | NC_045512.2 | 3′→5′ | 13152 | 13167 |
| 273 | GTGTGTACACAACATC | NC_045512.2 | 3′→5′ | 13153 | 13168 |
| 274 | TGTGTGTACACAACAT | NC_045512.2 | 3′→5′ | 13154 | 13169 |
| 275 | GTGTGTGTACACAACA | NC_045512.2 | 3′→5′ | 13155 | 13170 |
| 276 | AGTGTGTGTACACAAC | NC_045512.2 | 3′→5′ | 13156 | 13171 |
| 277 | CAGTGTGTGTACACAA | NC_045512.2 | 3′→5′ | 13157 | 13172 |
| 278 | CCAGTGTGTGTACACA | NC_045512.2 | 3′→5′ | 13158 | 13173 |
| 279 | ACCAGTGTGTGTACAC | NC_045512.2 | 3′→5′ | 13159 | 13174 |
| 280 | TACCAGTGTGTGTACA | NC_045512.2 | 3′→5′ | 13160 | 13175 |
| 281 | GTACCAGTGTGTGTAC | NC_045512.2 | 3′→5′ | 13161 | 13176 |
| 282 | GGTCATTAGCACAAGT | NC_045512.2 | 3′→5′ | 13328 | 13343 |
| 283 | GGGTCATTAGCACAAG | NC_045512.2 | 3′→5′ | 13329 | 13344 |
| 284 | TAAGTGTAAAACCCAC | NC_045512.2 | 3′→5′ | 13346 | 13361 |
| 285 | GGTACAGACTGTGTTT | NC_045512.2 | 3′→5′ | 13363 | 13378 |
| 286 | CGGTACAGACTGTGTT | NC_045512.2 | 3′→5′ | 13364 | 13379 |
| 287 | ACGGTACAGACTGTGT | NC_045512.2 | 3′→5′ | 13365 | 13380 |
| 288 | GACGGTACAGACTGTG | NC_045512.2 | 3′→5′ | 13366 | 13381 |
| 289 | AGACGGTACAGACTGT | NC_045512.2 | 3′→5′ | 13367 | 13382 |
| 290 | CAGACGGTACAGACTG | NC_045512.2 | 3′→5′ | 13368 | 13383 |
| 291 | GCAGACGGTACAGACT | NC_045512.2 | 3′→5′ | 13369 | 13384 |
| 292 | CGCAGACGGTACAGAC | NC_045512.2 | 3′→5′ | 13370 | 13385 |
| 293 | CCGCAGACGGTACAGA | NC_045512.2 | 3′→5′ | 13371 | 13386 |
| 294 | CATAACCTTTCCACAT | NC_045512.2 | 3′→5′ | 13388 | 13403 |
| 295 | CCATAACCTTTCCACA | NC_045512.2 | 3′→5′ | 13389 | 13404 |
| 296 | GCCATAACCTTTCCAC | NC_045512.2 | 3′→5′ | 13390 | 13405 |
| 297 | AGCCATAACCTTTCCA | NC_045512.2 | 3′→5′ | 13391 | 13406 |
| 298 | CAGCCATAACCTTTCC | NC_045512.2 | 3′→5′ | 13392 | 13407 |
| 299 | ACAGCCATAACCTTTC | NC_045512.2 | 3′→5′ | 13393 | 13408 |
| 300 | TACAGCCATAACCTTT | NC_045512.2 | 3′→5′ | 13394 | 13409 |
| 301 | CTACAGCCATAACCTT | NC_045512.2 | 3′→5′ | 13395 | 13410 |
| 302 | ACTACAGCCATAACCT | NC_045512.2 | 3′→5′ | 13396 | 13411 |
| 303 | AACTACAGCCATAACC | NC_045512.2 | 3′→5′ | 13397 | 13412 |
| 304 | CAACTACAGCCATAAC | NC_045512.2 | 3′→5′ | 13398 | 13413 |
| 305 | ACAACTACAGCCATAA | NC_045512.2 | 3′→5′ | 13399 | 13414 |
| 306 | CACAACTACAGCCATA | NC_045512.2 | 3′→5′ | 13400 | 13415 |
| 307 | TCACAACTACAGCCAT | NC_045512.2 | 3′→5′ | 13401 | 13416 |
| 308 | AACCCGTTTAAAAACG | NC_045512.2 | 3′→5′ | 13458 | 13473 |
| 309 | AAACCCGTTTAAAAAC | NC_045512.2 | 3′→5′ | 13459 | 13474 |
| 310 | CAAACCCGTTTAAAAA | NC_045512.2 | 3′→5′ | 13460 | 13475 |
| 311 | GCAAACCCGTTTAAAA | NC_045512.2 | 3′→5′ | 13461 | 13476 |
| 312 | CGCAAACCCGTTTAAA | NC_045512.2 | 3′→5′ | 13462 | 13477 |
| 313 | CCGCAAACCCGTTTAA | NC_045512.2 | 3′→5′ | 13463 | 13478 |
| 314 | ACCGCAAACCCGTTTA | NC_045512.2 | 3′→5′ | 13464 | 13479 |
| 315 | CACCGCAAACCCGTTT | NC_045512.2 | 3′→5′ | 13465 | 13480 |
| 316 | ACACCGCAAACCCGTT | NC_045512.2 | 3′→5′ | 13466 | 13481 |
| 317 | TACACCGCAAACCCGT | NC_045512.2 | 3′→5′ | 13467 | 13482 |
| 318 | TTACACCGCAAACCCG | NC_045512.2 | 3′→5′ | 13468 | 13483 |
| 319 | CTTACACCGCAAACCC | NC_045512.2 | 3′→5′ | 13469 | 13484 |
| 320 | ACTTACACCGCAAACC | NC_045512.2 | 3′→5′ | 13470 | 13485 |
| 321 | CACTTACACCGCAAAC | NC_045512.2 | 3′→5′ | 13471 | 13486 |
| 322 | GCACTTACACCGCAAA | NC_045512.2 | 3′→5′ | 13472 | 13487 |
| 323 | TGCACTTACACCGCAA | NC_045512.2 | 3′→5′ | 13473 | 13488 |
| 324 | CTGCACTTACACCGCA | NC_045512.2 | 3′→5′ | 13474 | 13489 |
| 325 | GCTGCACTTACACCGC | NC_045512.2 | 3′→5′ | 13475 | 13490 |
| 326 | GGCTGCACTTACACCG | NC_045512.2 | 3′→5′ | 13476 | 13491 |
| 327 | GGGCTGCACTTACACC | NC_045512.2 | 3′→5′ | 13477 | 13492 |
| 328 | CGGGCTGCACTTACAC | NC_045512.2 | 3′→5′ | 13478 | 13493 |
| 329 | ACGGGCTGCACTTACA | NC_045512.2 | 3′→5′ | 13479 | 13494 |
| 330 | GACGGGCTGCACTTAC | NC_045512.2 | 3′→5′ | 13480 | 13495 |
| 331 | AGACGGGCTGCACTTA | NC_045512.2 | 3′→5′ | 13481 | 13496 |
| 332 | AAGACGGGCTGCACTT | NC_045512.2 | 3′→5′ | 13482 | 13497 |
| 333 | TAAGACGGGCTGCACT | NC_045512.2 | 3′→5′ | 13483 | 13498 |
| 334 | GTAAGACGGGCTGCAC | NC_045512.2 | 3′→5′ | 13484 | 13499 |
| 335 | TGTAAGACGGGCTGCA | NC_045512.2 | 3′→5′ | 13485 | 13500 |
| 336 | GTGTAAGACGGGCTGC | NC_045512.2 | 3′→5′ | 13486 | 13501 |
| 337 | GGTGTAAGACGGGCTG | NC_045512.2 | 3′→5′ | 13487 | 13502 |
| 338 | CGGTGTAAGACGGGCT | NC_045512.2 | 3′→5′ | 13488 | 13503 |
| 339 | ACGGTGTAAGACGGGC | NC_045512.2 | 3′→5′ | 13489 | 13504 |
| 340 | CACGGTGTAAGACGGG | NC_045512.2 | 3′→5′ | 13490 | 13505 |
| 341 | GCACGGTGTAAGACGG | NC_045512.2 | 3′→5′ | 13491 | 13506 |
| 342 | CGCACGGTGTAAGACG | NC_045512.2 | 3′→5′ | 13492 | 13507 |
| 343 | CCGCACGGTGTAAGAC | NC_045512.2 | 3′→5′ | 13493 | 13508 |
| 344 | GCCGCACGGTGTAAGA | NC_045512.2 | 3′→5′ | 13494 | 13509 |
| 345 | TGCCGCACGGTGTAAG | NC_045512.2 | 3′→5′ | 13495 | 13510 |
| 346 | GTGCCGCACGGTGTAA | NC_045512.2 | 3′→5′ | 13496 | 13511 |
| 347 | TGTGCCGCACGGTGTA | NC_045512.2 | 3′→5′ | 13497 | 13512 |
| 348 | CTGTGCCGCACGGTGT | NC_045512.2 | 3′→5′ | 13498 | 13513 |
| 349 | CCTGTGCCGCACGGTG | NC_045512.2 | 3′→5′ | 13499 | 13514 |
| 350 | GCCTGTGCCGCACGGT | NC_045512.2 | 3′→5′ | 13500 | 13515 |
| 351 | TGCCTGTGCCGCACGG | NC_045512.2 | 3′→5′ | 13501 | 13516 |
| 352 | GTGCCTGTGCCGCACG | NC_045512.2 | 3′→5′ | 13502 | 13517 |
| 353 | AGTGCCTGTGCCGCAC | NC_045512.2 | 3′→5′ | 13503 | 13518 |
| 354 | TAGTGCCTGTGCCGCA | NC_045512.2 | 3′→5′ | 13504 | 13519 |
| 355 | CTAGTGCCTGTGCCGC | NC_045512.2 | 3′→5′ | 13505 | 13520 |
| 356 | AATTAGTTTTTAGGAA | NC_045512.2 | 3′→5′ | 13582 | 13597 |
| 357 | CAATTAGTTTTTAGGA | NC_045512.2 | 3′→5′ | 13583 | 13598 |
| 358 | CTTCATGTTGGTAGTT | NC_045512.2 | 3′→5′ | 13675 | 13690 |
| 359 | TCTTCATGTTGGTAGT | NC_045512.2 | 3′→5′ | 13676 | 13691 |
| 360 | GTGGTACCATGTCACC | NC_045512.2 | 3′→5′ | 13762 | 13777 |
| 361 | TGTGGTACCATGTCAC | NC_045512.2 | 3′→5′ | 13763 | 13778 |
| 362 | ATGTGGTACCATGTCA | NC_045512.2 | 3′→5′ | 13764 | 13779 |
| 363 | TATGTGGTACCATGTC | NC_045512.2 | 3′→5′ | 13765 | 13780 |
| 364 | ATATGTGGTACCATGT | NC_045512.2 | 3′→5′ | 13766 | 13781 |
| 365 | TATATGTGGTACCATG | NC_045512.2 | 3′→5′ | 13767 | 13782 |
| 366 | ATATATGTGGTACCAT | NC_045512.2 | 3′→5′ | 13768 | 13783 |
| 367 | GATATATGTGGTACCA | NC_045512.2 | 3′→5′ | 13769 | 13784 |
| 368 | TGATATATGTGGTACC | NC_045512.2 | 3′→5′ | 13770 | 13785 |
| 369 | GTGATATATGTGGTAC | NC_045512.2 | 3′→5′ | 13771 | 13786 |
| 370 | CGTGATATATGTGGTA | NC_045512.2 | 3′→5′ | 13772 | 13787 |
| 371 | ACGTGATATATGTGGT | NC_045512.2 | 3′→5′ | 13773 | 13788 |
| 372 | GACGTGATATATGTGG | NC_045512.2 | 3′→5′ | 13774 | 13789 |
| 373 | TGACGTGATATATGTG | NC_045512.2 | 3′→5′ | 13775 | 13790 |
| 374 | CCATTGTGTATTTAGT | NC_045512.2 | 3′→5′ | 13798 | 13813 |
| 375 | GCCATTGTGTATTTAG | NC_045512.2 | 3′→5′ | 13799 | 13814 |
| 376 | ATTTAAAATAACGGTC | NC_045512.2 | 3′→5′ | 14290 | 14305 |
| 377 | TATTTAAAATAACGGT | NC_045512.2 | 3′→5′ | 14291 | 14306 |
| 378 | ATATTTAAAATAACGG | NC_045512.2 | 3′→5′ | 14292 | 14307 |
| 379 | AATATTTAAAATAACG | NC_045512.2 | 3′→5′ | 14293 | 14308 |
| 380 | CAATATTTAAAATAAC | NC_045512.2 | 3′→5′ | 14294 | 14309 |
| 381 | CCAATATTTAAAATAA | NC_045512.2 | 3′→5′ | 14295 | 14310 |
| 382 | CCCAATATTTAAAATA | NC_045512.2 | 3′→5′ | 14296 | 14311 |
| 383 | TCCCAATATTTAAAAT | NC_045512.2 | 3′→5′ | 14297 | 14312 |
| 384 | TCATCCAAACAGTTAA | NC_045512.2 | 3′→5′ | 14336 | 14351 |
| 385 | CAAAACTTGTAGGTGG | NC_045512.2 | 3′→5′ | 14404 | 14419 |
| 386 | CCAAAACTTGTAGGTG | NC_045512.2 | 3′→5′ | 14405 | 14420 |
| 387 | TCCAAAACTTGTAGGT | NC_045512.2 | 3′→5′ | 14406 | 14421 |
| 388 | GTCCAAAACTTGTAGG | NC_045512.2 | 3′→5′ | 14407 | 14422 |
| 389 | GGTCCAAAACTTGTAG | NC_045512.2 | 3′→5′ | 14408 | 14423 |
| 390 | TGGTCCAAAACTTGTA | NC_045512.2 | 3′→5′ | 14409 | 14424 |
| 391 | GTGGTCCAAAACTTGT | NC_045512.2 | 3′→5′ | 14410 | 14425 |
| 392 | AGTGGTCCAAAACTTG | NC_045512.2 | 3′→5′ | 14411 | 14426 |
| 393 | TAGTGGTCCAAAACTT | NC_045512.2 | 3′→5′ | 14412 | 14427 |
| 394 | CTAGTGGTCCAAAACT | NC_045512.2 | 3′→5′ | 14413 | 14428 |
| 395 | ACTAGTGGTCCAAAAC | NC_045512.2 | 3′→5′ | 14414 | 14429 |
| 396 | CATCCTGATTATGTAC | NC_045512.2 | 3′→5′ | 14500 | 14515 |
| 397 | ACATCCTGATTATGTA | NC_045512.2 | 3′→5′ | 14501 | 14516 |
| 398 | TACATCCTGATTATGT | NC_045512.2 | 3′→5′ | 14502 | 14517 |
| 399 | TTACATCCTGATTATG | NC_045512.2 | 3′→5′ | 14503 | 14518 |
| 400 | TTTACATCCTGATTAT | NC_045512.2 | 3′→5′ | 14504 | 14519 |
| 401 | GTTTACATCCTGATTA | NC_045512.2 | 3′→5′ | 14505 | 14520 |
| 402 | AGTTTACATCCTGATT | NC_045512.2 | 3′→5′ | 14506 | 14521 |
| 403 | AAGTTTACATCCTGAT | NC_045512.2 | 3′→5′ | 14507 | 14522 |
| 404 | TAAGTTTACATCCTGA | NC_045512.2 | 3′→5′ | 14508 | 14523 |
| 405 | GTAAGTTTACATCCTG | NC_045512.2 | 3′→5′ | 14509 | 14524 |
| 406 | TGTAAGTTTACATCCT | NC_045512.2 | 3′→5′ | 14510 | 14525 |
| 407 | ATGTAAGTTTACATCC | NC_045512.2 | 3′→5′ | 14511 | 14526 |
| 408 | TATGTAAGTTTACATC | NC_045512.2 | 3′→5′ | 14512 | 14527 |
| 409 | CTATGTAAGTTTACAT | NC_045512.2 | 3′→5′ | 14513 | 14528 |
| 410 | GCTATGTAAGTTTACA | NC_045512.2 | 3′→5′ | 14514 | 14529 |
| 411 | AGCTATGTAAGTTTAC | NC_045512.2 | 3′→5′ | 14515 | 14530 |
| 412 | GAGCTATGTAAGTTTA | NC_045512.2 | 3′→5′ | 14516 | 14531 |
| 413 | TAGTGCGTTTATCTAG | NC_045512.2 | 3′→5′ | 14605 | 14620 |
| 414 | GTAGTGCGTTTATCTA | NC_045512.2 | 3′→5′ | 14606 | 14621 |
| 415 | CAGCTACTGAAAAGCA | NC_045512.2 | 3′→5′ | 14623 | 14638 |
| 416 | GCAGCTACTGAAAAGC | NC_045512.2 | 3′→5′ | 14624 | 14639 |
| 417 | TGCAGCTACTGAAAAG | NC_045512.2 | 3′→5′ | 14625 | 14640 |
| 418 | GTGCAGCTACTGAAAA | NC_045512.2 | 3′→5′ | 14626 | 14641 |
| 419 | AGTGCAGCTACTGAAA | NC_045512.2 | 3′→5′ | 14627 | 14642 |
| 420 | TTTGAAAAGCAACATT | NC_045512.2 | 3′→5′ | 14650 | 14665 |
| 421 | GTTTGAAAAGCAACAT | NC_045512.2 | 3′→5′ | 14651 | 14666 |
| 422 | AGTTTGAAAAGCAACA | NC_045512.2 | 3′→5′ | 14652 | 14667 |
| 423 | CAGTTTGAAAAGCAAC | NC_045512.2 | 3′→5′ | 14653 | 14668 |
| 424 | ACAGTTTGAAAAGCAA | NC_045512.2 | 3′→5′ | 14654 | 14669 |
| 425 | GACAGTTTGAAAAGCA | NC_045512.2 | 3′→5′ | 14655 | 14670 |
| 426 | TGACAGTTTGAAAAGC | NC_045512.2 | 3′→5′ | 14656 | 14671 |
| 427 | TTGACAGTTTGAAAAG | NC_045512.2 | 3′→5′ | 14657 | 14672 |
| 428 | TTTGACAGTTTGAAAA | NC_045512.2 | 3′→5′ | 14658 | 14673 |
| 429 | GTTTGACAGTTTGAAA | NC_045512.2 | 3′→5′ | 14659 | 14674 |
| 430 | GGTTTGACAGTTTGAA | NC_045512.2 | 3′→5′ | 14660 | 14675 |
| 431 | GGGTTTGACAGTTTGA | NC_045512.2 | 3′→5′ | 14661 | 14676 |
| 432 | CGGGTTTGACAGTTTG | NC_045512.2 | 3′→5′ | 14662 | 14677 |
| 433 | CCGGGTTTGACAGTTT | NC_045512.2 | 3′→5′ | 14663 | 14678 |
| 434 | ACCGGGTTTGACAGTT | NC_045512.2 | 3′→5′ | 14664 | 14679 |
| 435 | TACCGGGTTTGACAGT | NC_045512.2 | 3′→5′ | 14665 | 14680 |
| 436 | TTACCGGGTTTGACAG | NC_045512.2 | 3′→5′ | 14666 | 14681 |
| 437 | ATTACCGGGTTTGACA | NC_045512.2 | 3′→5′ | 14667 | 14682 |
| 438 | AATTACCGGGTTTGAC | NC_045512.2 | 3′→5′ | 14668 | 14683 |
| 439 | AAATTACCGGGTTTGA | NC_045512.2 | 3′→5′ | 14669 | 14684 |
| 440 | AAAATTACCGGGTTTG | NC_045512.2 | 3′→5′ | 14670 | 14685 |
| 441 | TAAAATTACCGGGTTT | NC_045512.2 | 3′→5′ | 14671 | 14686 |
| 442 | TTAAAATTACCGGGTT | NC_045512.2 | 3′→5′ | 14672 | 14687 |
| 443 | ACACAGCAAAGTCATA | NC_045512.2 | 3′→5′ | 14698 | 14713 |
| 444 | GACACAGCAAAGTCAT | NC_045512.2 | 3′→5′ | 14699 | 14714 |
| 445 | AGACACAGCAAAGTCA | NC_045512.2 | 3′→5′ | 14700 | 14715 |
| 446 | TAGACACAGCAAAGTC | NC_045512.2 | 3′→5′ | 14701 | 14716 |
| 447 | TTAGACACAGCAAAGT | NC_045512.2 | 3′→5′ | 14702 | 14717 |
| 448 | TTCCTTCCTTAAAGAA | NC_045512.2 | 3′→5′ | 14722 | 14737 |
| 449 | CTTCCTTCCTTAAAGA | NC_045512.2 | 3′→5′ | 14723 | 14738 |
| 450 | ACTTCCTTCCTTAAAG | NC_045512.2 | 3′→5′ | 14724 | 14739 |
| 451 | AACTTCCTTCCTTAAA | NC_045512.2 | 3′→5′ | 14725 | 14740 |
| 452 | GAACTTCCTTCCTTAA | NC_045512.2 | 3′→5′ | 14726 | 14741 |
| 453 | AGAACTTCCTTCCTTA | NC_045512.2 | 3′→5′ | 14727 | 14742 |
| 454 | CAGAACTTCCTTCCTT | NC_045512.2 | 3′→5′ | 14728 | 14743 |
| 455 | ACAGAACTTCCTTCCT | NC_045512.2 | 3′→5′ | 14729 | 14744 |
| 456 | AACAGAACTTCCTTCC | NC_045512.2 | 3′→5′ | 14730 | 14745 |
| 457 | CAACAGAACTTCCTTC | NC_045512.2 | 3′→5′ | 14731 | 14746 |
| 458 | TCAACAGAACTTCCTT | NC_045512.2 | 3′→5′ | 14732 | 14747 |
| 459 | TTCAACAGAACTTCCT | NC_045512.2 | 3′→5′ | 14733 | 14748 |
| 460 | AAGAAGAAGTGTTTTA | NC_045512.2 | 3′→5′ | 14750 | 14765 |
| 461 | AAAGAAGAAGTGTTTT | NC_045512.2 | 3′→5′ | 14751 | 14766 |
| 462 | CAAAGAAGAAGTGTTT | NC_045512.2 | 3′→5′ | 14752 | 14767 |
| 463 | GCAAAGAAGAAGTGTT | NC_045512.2 | 3′→5′ | 14753 | 14768 |
| 464 | AGCAAAGAAGAAGTGT | NC_045512.2 | 3′→5′ | 14754 | 14769 |
| 465 | GAGCAAAGAAGAAGTG | NC_045512.2 | 3′→5′ | 14755 | 14770 |
| 466 | TGAGCAAAGAAGAAGT | NC_045512.2 | 3′→5′ | 14756 | 14771 |
| 467 | CTGAGCAAAGAAGAAG | NC_045512.2 | 3′→5′ | 14757 | 14772 |
| 468 | CCTGAGCAAAGAAGAA | NC_045512.2 | 3′→5′ | 14758 | 14773 |
| 469 | TCCTGAGCAAAGAAGA | NC_045512.2 | 3′→5′ | 14759 | 14774 |
| 470 | ATCCTGAGCAAAGAAG | NC_045512.2 | 3′→5′ | 14760 | 14775 |
| 471 | CATCCTGAGCAAAGAA | NC_045512.2 | 3′→5′ | 14761 | 14776 |
| 472 | CCATCCTGAGCAAAGA | NC_045512.2 | 3′→5′ | 14762 | 14777 |
| 473 | TATCACACATTGTTGG | NC_045512.2 | 3′→5′ | 14821 | 14836 |
| 474 | ATATCACACATTGTTG | NC_045512.2 | 3′→5′ | 14822 | 14837 |
| 475 | GATATCACACATTGTT | NC_045512.2 | 3′→5′ | 14823 | 14838 |
| 476 | TGATATCACACATTGT | NC_045512.2 | 3′→5′ | 14824 | 14839 |
| 477 | CTGATATCACACATTG | NC_045512.2 | 3′→5′ | 14825 | 14840 |
| 478 | TCTGATATCACACATT | NC_045512.2 | 3′→5′ | 14826 | 14841 |
| 479 | GTCTGATATCACACAT | NC_045512.2 | 3′→5′ | 14827 | 14842 |
| 480 | TGTCTGATATCACACA | NC_045512.2 | 3′→5′ | 14828 | 14843 |
| 481 | TTGTCTGATATCACAC | NC_045512.2 | 3′→5′ | 14829 | 14844 |
| 482 | GTTGTCTGATATCACA | NC_045512.2 | 3′→5′ | 14830 | 14845 |
| 483 | AGTTGTCTGATATCAC | NC_045512.2 | 3′→5′ | 14831 | 14846 |
| 484 | CAACAACTTCAACTAC | NC_045512.2 | 3′→5′ | 14854 | 14869 |
| 485 | TCAACAACTTCAACTA | NC_045512.2 | 3′→5′ | 14855 | 14870 |
| 486 | ATCAACAACTTCAACT | NC_045512.2 | 3′→5′ | 14856 | 14871 |
| 487 | TATCAACAACTTCAAC | NC_045512.2 | 3′→5′ | 14857 | 14872 |
| 488 | TTATCAACAACTTCAA | NC_045512.2 | 3′→5′ | 14858 | 14873 |
| 489 | CGTAACAATCAAAGTA | NC_045512.2 | 3′→5′ | 14875 | 14890 |
| 490 | TCGTAACAATCAAAGT | NC_045512.2 | 3′→5′ | 14876 | 14891 |
| 491 | ATCGTAACAATCAAAG | NC_045512.2 | 3′→5′ | 14877 | 14892 |
| 492 | CATCGTAACAATCAAA | NC_045512.2 | 3′→5′ | 14878 | 14893 |
| 493 | CCATCGTAACAATCAA | NC_045512.2 | 3′→5′ | 14879 | 14894 |
| 494 | ACCATCGTAACAATCA | NC_045512.2 | 3′→5′ | 14880 | 14895 |
| 495 | CACCATCGTAACAATC | NC_045512.2 | 3′→5′ | 14881 | 14896 |
| 496 | CCACCATCGTAACAAT | NC_045512.2 | 3′→5′ | 14882 | 14897 |
| 497 | GCCACCATCGTAACAA | NC_045512.2 | 3′→5′ | 14883 | 14898 |
| 498 | AGCCACCATCGTAACA | NC_045512.2 | 3′→5′ | 14884 | 14899 |
| 499 | CAGCCACCATCGTAAC | NC_045512.2 | 3′→5′ | 14885 | 14900 |
| 500 | ACAGCCACCATCGTAA | NC_045512.2 | 3′→5′ | 14886 | 14901 |
| 501 | TACAGCCACCATCGTA | NC_045512.2 | 3′→5′ | 14887 | 14902 |
| 502 | ATACAGCCACCATCGT | NC_045512.2 | 3′→5′ | 14888 | 14903 |
| 503 | TAGCCTTACCCCATTT | NC_045512.2 | 3′→5′ | 14962 | 14977 |
| 504 | CTAGCCTTACCCCATT | NC_045512.2 | 3′→5′ | 14963 | 14978 |
| 505 | TCTAGCCTTACCCCAT | NC_045512.2 | 3′→5′ | 14964 | 14979 |
| 506 | GTCTAGCCTTACCCCA | NC_045512.2 | 3′→5′ | 14965 | 14980 |
| 507 | AGTCTAGCCTTACCCC | NC_045512.2 | 3′→5′ | 14966 | 14981 |
| 508 | AAGTCTAGCCTTACCC | NC_045512.2 | 3′→5′ | 14967 | 14982 |
| 509 | AAAGTCTAGCCTTACC | NC_045512.2 | 3′→5′ | 14968 | 14983 |
| 510 | TAAAGTCTAGCCTTAC | NC_045512.2 | 3′→5′ | 14969 | 14984 |
| 511 | ATAAAGTCTAGCCTTA | NC_045512.2 | 3′→5′ | 14970 | 14985 |
| 512 | AATAAAGTCTAGCCTT | NC_045512.2 | 3′→5′ | 14971 | 14986 |
| 513 | TAATAAAGTCTAGCCT | NC_045512.2 | 3′→5′ | 14972 | 14987 |
| 514 | ATAATAAAGTCTAGCC | NC_045512.2 | 3′→5′ | 14973 | 14988 |
| 515 | CATAATAAAGTCTAGC | NC_045512.2 | 3′→5′ | 14974 | 14989 |
| 516 | TCATAATAAAGTCTAG | NC_045512.2 | 3′→5′ | 14975 | 14990 |
| 517 | CCTCATAACTCATTGA | NC_045512.2 | 3′→5′ | 14992 | 15007 |
| 518 | TCCTCATAACTCATTG | NC_045512.2 | 3′→5′ | 14993 | 15008 |
| 519 | ATCCTCATAACTCATT | NC_045512.2 | 3′→5′ | 14994 | 15009 |
| 520 | GATCCTCATAACTCAT | NC_045512.2 | 3′→5′ | 14995 | 15010 |
| 521 | TGATCCTCATAACTCA | NC_045512.2 | 3′→5′ | 14996 | 15011 |
| 522 | TTGATCCTCATAACTC | NC_045512.2 | 3′→5′ | 14997 | 15012 |
| 523 | CTTGATCCTCATAACT | NC_045512.2 | 3′→5′ | 14998 | 15013 |
| 524 | TCTTGATCCTCATAAC | NC_045512.2 | 3′→5′ | 14999 | 15014 |
| 525 | ATCTTGATCCTCATAA | NC_045512.2 | 3′→5′ | 15000 | 15015 |
| 526 | CATCTTGATCCTCATA | NC_045512.2 | 3′→5′ | 15001 | 15016 |
| 527 | GCATCTTGATCCTCAT | NC_045512.2 | 3′→5′ | 15002 | 15017 |
| 528 | TGCATCTTGATCCTCA | NC_045512.2 | 3′→5′ | 15003 | 15018 |
| 529 | GTGCATCTTGATCCTC | NC_045512.2 | 3′→5′ | 15004 | 15019 |
| 530 | AGTGCATCTTGATCCT | NC_045512.2 | 3′→5′ | 15005 | 15020 |
| 531 | TAGGGATGACATTACG | NC_045512.2 | 3′→5′ | 15037 | 15052 |
| 532 | GTAGGGATGACATTAC | NC_045512.2 | 3′→5′ | 15038 | 15053 |
| 533 | GATTCATTTGAGTTAT | NC_045512.2 | 3′→5′ | 15055 | 15070 |
| 534 | AGATTCATTTGAGTTA | NC_045512.2 | 3′→5′ | 15056 | 15071 |
| 535 | AAGATTCATTTGAGTT | NC_045512.2 | 3′→5′ | 15057 | 15072 |
| 536 | TAAGATTCATTTGAGT | NC_045512.2 | 3′→5′ | 15058 | 15073 |
| 537 | TTAAGATTCATTTGAG | NC_045512.2 | 3′→5′ | 15059 | 15074 |
| 538 | CTTAAGATTCATTTGA | NC_045512.2 | 3′→5′ | 15060 | 15075 |
| 539 | ACTTAAGATTCATTTG | NC_045512.2 | 3′→5′ | 15061 | 15076 |
| 540 | TACTTAAGATTCATTT | NC_045512.2 | 3′→5′ | 15062 | 15077 |
| 541 | ATACTTAAGATTCATT | NC_045512.2 | 3′→5′ | 15063 | 15078 |
| 542 | CATACTTAAGATTCAT | NC_045512.2 | 3′→5′ | 15064 | 15079 |
| 543 | GCATACTTAAGATTCA | NC_045512.2 | 3′→5′ | 15065 | 15080 |
| 544 | GGCATACTTAAGATTC | NC_045512.2 | 3′→5′ | 15066 | 15081 |
| 545 | TGGCATACTTAAGATT | NC_045512.2 | 3′→5′ | 15067 | 15082 |
| 546 | ATGGCATACTTAAGAT | NC_045512.2 | 3′→5′ | 15068 | 15083 |
| 547 | AATGGCATACTTAAGA | NC_045512.2 | 3′→5′ | 15069 | 15084 |
| 548 | TAATGGCATACTTAAG | NC_045512.2 | 3′→5′ | 15070 | 15085 |
| 549 | CTAATGGCATACTTAA | NC_045512.2 | 3′→5′ | 15071 | 15086 |
| 550 | ACTAATGGCATACTTA | NC_045512.2 | 3′→5′ | 15072 | 15087 |
| 551 | CACTAATGGCATACTT | NC_045512.2 | 3′→5′ | 15073 | 15088 |
| 552 | GCACTAATGGCATACT | NC_045512.2 | 3′→5′ | 15074 | 15089 |
| 553 | TGCACTAATGGCATAC | NC_045512.2 | 3′→5′ | 15075 | 15090 |
| 554 | TTGCACTAATGGCATA | NC_045512.2 | 3′→5′ | 15076 | 15091 |
| 555 | TTTGCACTAATGGCAT | NC_045512.2 | 3′→5′ | 15077 | 15092 |
| 556 | CTTTGCACTAATGGCA | NC_045512.2 | 3′→5′ | 15078 | 15093 |
| 557 | TCTTTGCACTAATGGC | NC_045512.2 | 3′→5′ | 15079 | 15094 |
| 558 | TTCTTTGCACTAATGG | NC_045512.2 | 3′→5′ | 15080 | 15095 |
| 559 | ATTCTTTGCACTAATG | NC_045512.2 | 3′→5′ | 15081 | 15096 |
| 560 | TATTCTTTGCACTAAT | NC_045512.2 | 3′→5′ | 15082 | 15097 |
| 561 | CTATTCTTTGCACTAA | NC_045512.2 | 3′→5′ | 15083 | 15098 |
| 562 | TCTATTCTTTGCACTA | NC_045512.2 | 3′→5′ | 15084 | 15099 |
| 563 | CTCTATTCTTTGCACT | NC_045512.2 | 3′→5′ | 15085 | 15100 |
| 564 | GCTCTATTCTTTGCAC | NC_045512.2 | 3′→5′ | 15086 | 15101 |
| 565 | AGCTCTATTCTTTGCA | NC_045512.2 | 3′→5′ | 15087 | 15102 |
| 566 | GAGCTCTATTCTTTGC | NC_045512.2 | 3′→5′ | 15088 | 15103 |
| 567 | CGAGCTCTATTCTTTG | NC_045512.2 | 3′→5′ | 15089 | 15104 |
| 568 | GCGAGCTCTATTCTTT | NC_045512.2 | 3′→5′ | 15090 | 15105 |
| 569 | TGCGAGCTCTATTCTT | NC_045512.2 | 3′→5′ | 15091 | 15106 |
| 570 | GTGCGAGCTCTATTCT | NC_045512.2 | 3′→5′ | 15092 | 15107 |
| 571 | GGTGCGAGCTCTATTC | NC_045512.2 | 3′→5′ | 15093 | 15108 |
| 572 | CGGTGCGAGCTCTATT | NC_045512.2 | 3′→5′ | 15094 | 15109 |
| 573 | ACGGTGCGAGCTCTAT | NC_045512.2 | 3′→5′ | 15095 | 15110 |
| 574 | TACGGTGCGAGCTCTA | NC_045512.2 | 3′→5′ | 15096 | 15111 |
| 575 | CTACGGTGCGAGCTCT | NC_045512.2 | 3′→5′ | 15097 | 15112 |
| 576 | GCTACGGTGCGAGCTC | NC_045512.2 | 3′→5′ | 15098 | 15113 |
| 577 | AGCTACGGTGCGAGCT | NC_045512.2 | 3′→5′ | 15099 | 15114 |
| 578 | CAGCTACGGTGCGAGC | NC_045512.2 | 3′→5′ | 15100 | 15115 |
| 579 | CCAGCTACGGTGCGAG | NC_045512.2 | 3′→5′ | 15101 | 15116 |
| 580 | ACCAGCTACGGTGCGA | NC_045512.2 | 3′→5′ | 15102 | 15117 |
| 581 | CACCAGCTACGGTGCG | NC_045512.2 | 3′→5′ | 15103 | 15118 |
| 582 | ACACCAGCTACGGTGC | NC_045512.2 | 3′→5′ | 15104 | 15119 |
| 583 | GACACCAGCTACGGTG | NC_045512.2 | 3′→5′ | 15105 | 15120 |
| 584 | AGACACCAGCTACGGT | NC_045512.2 | 3′→5′ | 15106 | 15121 |
| 585 | GAGACACCAGCTACGG | NC_045512.2 | 3′→5′ | 15107 | 15122 |
| 586 | AGAGACACCAGCTACG | NC_045512.2 | 3′→5′ | 15108 | 15123 |
| 587 | TAGAGACACCAGCTAC | NC_045512.2 | 3′→5′ | 15109 | 15124 |
| 588 | ATAGAGACACCAGCTA | NC_045512.2 | 3′→5′ | 15110 | 15125 |
| 589 | GATAGAGACACCAGCT | NC_045512.2 | 3′→5′ | 15111 | 15126 |
| 590 | AGATAGAGACACCAGC | NC_045512.2 | 3′→5′ | 15112 | 15127 |
| 591 | CAGATAGAGACACCAG | NC_045512.2 | 3′→5′ | 15113 | 15128 |
| 592 | ACAGATAGAGACACCA | NC_045512.2 | 3′→5′ | 15114 | 15129 |
| 593 | TACAGATAGAGACACC | NC_045512.2 | 3′→5′ | 15115 | 15130 |
| 594 | CTACAGATAGAGACAC | NC_045512.2 | 3′→5′ | 15116 | 15131 |
| 595 | ACTACAGATAGAGACA | NC_045512.2 | 3′→5′ | 15117 | 15132 |
| 596 | TACTACAGATAGAGAC | NC_045512.2 | 3′→5′ | 15118 | 15133 |
| 597 | GTACTACAGATAGAGA | NC_045512.2 | 3′→5′ | 15119 | 15134 |
| 598 | AGTACTACAGATAGAG | NC_045512.2 | 3′→5′ | 15120 | 15135 |
| 599 | TAGTACTACAGATAGA | NC_045512.2 | 3′→5′ | 15121 | 15136 |
| 600 | ATAGTACTACAGATAG | NC_045512.2 | 3′→5′ | 15122 | 15137 |
| 601 | CATAGTACTACAGATA | NC_045512.2 | 3′→5′ | 15123 | 15138 |
| 602 | TCATAGTACTACAGAT | NC_045512.2 | 3′→5′ | 15124 | 15139 |
| 603 | GTCATAGTACTACAGA | NC_045512.2 | 3′→5′ | 15125 | 15140 |
| 604 | GATGAAACTGTCTATT | NC_045512.2 | 3′→5′ | 15142 | 15157 |
| 605 | TGATGAAACTGTCTAT | NC_045512.2 | 3′→5′ | 15143 | 15158 |
| 606 | TAGTGGCGGCTATTGA | NC_045512.2 | 3′→5′ | 15172 | 15187 |
| 607 | CTAGTGGCGGCTATTG | NC_045512.2 | 3′→5′ | 15173 | 15188 |
| 608 | TCTAGTGGCGGCTATT | NC_045512.2 | 3′→5′ | 15174 | 15189 |
| 609 | CTCTAGTGGCGGCTAT | NC_045512.2 | 3′→5′ | 15175 | 15190 |
| 610 | CCTCTAGTGGCGGCTA | NC_045512.2 | 3′→5′ | 15176 | 15191 |
| 611 | TCCTCTAGTGGCGGCT | NC_045512.2 | 3′→5′ | 15177 | 15192 |
| 612 | CTCCTCTAGTGGCGGC | NC_045512.2 | 3′→5′ | 15178 | 15193 |
| 613 | GCTCCTCTAGTGGCGG | NC_045512.2 | 3′→5′ | 15179 | 15194 |
| 614 | AGCTCCTCTAGTGGCG | NC_045512.2 | 3′→5′ | 15180 | 15195 |
| 615 | TAGCTCCTCTAGTGGC | NC_045512.2 | 3′→5′ | 15181 | 15196 |
| 616 | GTAGCTCCTCTAGTGG | NC_045512.2 | 3′→5′ | 15182 | 15197 |
| 617 | AGTAGCTCCTCTAGTG | NC_045512.2 | 3′→5′ | 15183 | 15198 |
| 618 | CAGTAGCTCCTCTAGT | NC_045512.2 | 3′→5′ | 15184 | 15199 |
| 619 | ACAGTAGCTCCTCTAG | NC_045512.2 | 3′→5′ | 15185 | 15200 |
| 620 | TGCTTGTTCCAATTAC | NC_045512.2 | 3′→5′ | 15202 | 15217 |
| 621 | TTGCTTGTTCCAATTA | NC_045512.2 | 3′→5′ | 15203 | 15218 |
| 622 | AAACAGTTTTTAACAT | NC_045512.2 | 3′→5′ | 15241 | 15256 |
| 623 | TAAACAGTTTTTAACA | NC_045512.2 | 3′→5′ | 15242 | 15257 |
| 624 | CCCAACCCATAAGGTG | NC_045512.2 | 3′→5′ | 15277 | 15292 |
| 625 | TCCCAACCCATAAGGT | NC_045512.2 | 3′→5′ | 15278 | 15293 |
| 626 | TGTTAGGCATGGCTCT | NC_045512.2 | 3′→5′ | 15310 | 15325 |
| 627 | ATGTTAGGCATGGCTC | NC_045512.2 | 3′→5′ | 15311 | 15326 |
| 628 | CATGTTAGGCATGGCT | NC_045512.2 | 3′→5′ | 15312 | 15327 |
| 629 | GCATGTTAGGCATGGC | NC_045512.2 | 3′→5′ | 15313 | 15328 |
| 630 | AGCATGTTAGGCATGG | NC_045512.2 | 3′→5′ | 15314 | 15329 |
| 631 | AAGCATGTTAGGCATG | NC_045512.2 | 3′→5′ | 15315 | 15330 |
| 632 | TAAGCATGTTAGGCAT | NC_045512.2 | 3′→5′ | 15316 | 15331 |
| 633 | CTAAGCATGTTAGGCA | NC_045512.2 | 3′→5′ | 15317 | 15332 |
| 634 | TGCGAGCAAGAACAAG | NC_045512.2 | 3′→5′ | 15346 | 15361 |
| 635 | TTGCGAGCAAGAACAA | NC_045512.2 | 3′→5′ | 15347 | 15362 |
| 636 | TTTGCGAGCAAGAACA | NC_045512.2 | 3′→5′ | 15348 | 15363 |
| 637 | GTTTGCGAGCAAGAAC | NC_045512.2 | 3′→5′ | 15349 | 15364 |
| 638 | TGTTTGCGAGCAAGAA | NC_045512.2 | 3′→5′ | 15350 | 15365 |
| 639 | ATGTTTGCGAGCAAGA | NC_045512.2 | 3′→5′ | 15351 | 15366 |
| 640 | TATGTTTGCGAGCAAG | NC_045512.2 | 3′→5′ | 15352 | 15367 |
| 641 | CGCCACACATGACCAT | NC_045512.2 | 3′→5′ | 15436 | 15451 |
| 642 | CCGCCACACATGACCA | NC_045512.2 | 3′→5′ | 15437 | 15452 |
| 643 | TAGCATAAGCAGTTGT | NC_045512.2 | 3′→5′ | 15496 | 15511 |
| 644 | TTAGCATAAGCAGTTG | NC_045512.2 | 3′→5′ | 15497 | 15512 |
| 645 | ATTAGCATAAGCAGTT | NC_045512.2 | 3′→5′ | 15498 | 15513 |
| 646 | TATTAGCATAAGCAGT | NC_045512.2 | 3′→5′ | 15499 | 15514 |
| 647 | CTATTAGCATAAGCAG | NC_045512.2 | 3′→5′ | 15500 | 15515 |
| 648 | ACTATTAGCATAAGCA | NC_045512.2 | 3′→5′ | 15501 | 15516 |
| 649 | CACTATTAGCATAAGC | NC_045512.2 | 3′→5′ | 15502 | 15517 |
| 650 | ACACTATTAGCATAAG | NC_045512.2 | 3′→5′ | 15503 | 15518 |
| 651 | CTTGACAAATGTTAAA | NC_045512.2 | 3′→5′ | 15520 | 15535 |
| 652 | GCTTGACAAATGTTAA | NC_045512.2 | 3′→5′ | 15521 | 15536 |
| 653 | TATAGAGACACTCATA | NC_045512.2 | 3′→5′ | 15622 | 15637 |
| 654 | CTATAGAGACACTCAT | NC_045512.2 | 3′→5′ | 15623 | 15638 |
| 655 | TCTATAGAGACACTCA | NC_045512.2 | 3′→5′ | 15624 | 15639 |
| 656 | TTCTATAGAGACACTC | NC_045512.2 | 3′→5′ | 15625 | 15640 |
| 657 | TTTCTATAGAGACACT | NC_045512.2 | 3′→5′ | 15626 | 15641 |
| 658 | ATTTCTATAGAGACAC | NC_045512.2 | 3′→5′ | 15627 | 15642 |
| 659 | TATTTCTATAGAGACA | NC_045512.2 | 3′→5′ | 15628 | 15643 |
| 660 | CTATTTCTATAGAGAC | NC_045512.2 | 3′→5′ | 15629 | 15644 |
| 661 | GAGAAATGTTTACGCA | NC_045512.2 | 3′→5′ | 15686 | 15701 |
| 662 | GGTCAGTCTCAGTCCA | NC_045512.2 | 3′→5′ | 15838 | 15853 |
| 663 | AGGTCAGTCTCAGTCC | NC_045512.2 | 3′→5′ | 15839 | 15854 |
| 664 | AAGGTCAGTCTCAGTC | NC_045512.2 | 3′→5′ | 15840 | 15855 |
| 665 | TAAGGTCAGTCTCAGT | NC_045512.2 | 3′→5′ | 15841 | 15856 |
| 666 | GTAAGGTCAGTCTCAG | NC_045512.2 | 3′→5′ | 15842 | 15857 |
| 667 | AGTAAGGTCAGTCTCA | NC_045512.2 | 3′→5′ | 15843 | 15858 |
| 668 | TAGTAAGGTCAGTCTC | NC_045512.2 | 3′→5′ | 15844 | 15859 |
| 669 | TTAGTAAGGTCAGTCT | NC_045512.2 | 3′→5′ | 15845 | 15860 |
| 670 | TTTAGTAAGGTCAGTC | NC_045512.2 | 3′→5′ | 15846 | 15861 |
| 671 | CTTTAGTAAGGTCAGT | NC_045512.2 | 3′→5′ | 15847 | 15862 |
| 672 | CCTTTAGTAAGGTCAG | NC_045512.2 | 3′→5′ | 15848 | 15863 |
| 673 | TCCTTTAGTAAGGTCA | NC_045512.2 | 3′→5′ | 15849 | 15864 |
| 674 | GTCCTTTAGTAAGGTC | NC_045512.2 | 3′→5′ | 15850 | 15865 |
| 675 | GGTCCTTTAGTAAGGT | NC_045512.2 | 3′→5′ | 15851 | 15866 |
| 676 | AGGTCCTTTAGTAAGG | NC_045512.2 | 3′→5′ | 15852 | 15867 |
| 677 | GAGGTCCTTTAGTAAG | NC_045512.2 | 3′→5′ | 15853 | 15868 |
| 678 | TGAGGTCCTTTAGTAA | NC_045512.2 | 3′→5′ | 15854 | 15869 |
| 679 | TAACTAGCATTGTATG | NC_045512.2 | 3′→5′ | 15886 | 15901 |
| 680 | TTAACTAGCATTGTAT | NC_045512.2 | 3′→5′ | 15887 | 15902 |
| 681 | TTTAACTAGCATTGTA | NC_045512.2 | 3′→5′ | 15888 | 15903 |
| 682 | GTTTAACTAGCATTGT | NC_045512.2 | 3′→5′ | 15889 | 15904 |
| 683 | TGTTTAACTAGCATTG | NC_045512.2 | 3′→5′ | 15890 | 15905 |
| 684 | ATGGATCTGGGTAAGG | NC_045512.2 | 3′→5′ | 15928 | 15943 |
| 685 | GATGGATCTGGGTAAG | NC_045512.2 | 3′→5′ | 15929 | 15944 |
| 686 | GTGTACCATCTGTTTT | NC_045512.2 | 3′→5′ | 15985 | 16000 |
| 687 | AGTGTACCATCTGTTT | NC_045512.2 | 3′→5′ | 15986 | 16001 |
| 688 | AAGTGTACCATCTGTT | NC_045512.2 | 3′→5′ | 15987 | 16002 |
| 689 | TAAGTGTACCATCTGT | NC_045512.2 | 3′→5′ | 15988 | 16003 |
| 690 | ATAAGTGTACCATCTG | NC_045512.2 | 3′→5′ | 15989 | 16004 |
| 691 | CATAAGTGTACCATCT | NC_045512.2 | 3′→5′ | 15990 | 16005 |
| 692 | TCATAAGTGTACCATC | NC_045512.2 | 3′→5′ | 15991 | 16006 |
| 693 | ATCATAAGTGTACCAT | NC_045512.2 | 3′→5′ | 15992 | 16007 |
| 694 | AATCATAAGTGTACCA | NC_045512.2 | 3′→5′ | 15993 | 16008 |
| 695 | CAATCATAAGTGTACC | NC_045512.2 | 3′→5′ | 15994 | 16009 |
| 696 | TCAATCATAAGTGTAC | NC_045512.2 | 3′→5′ | 15995 | 16010 |
| 697 | CATACTCCTGATTAGG | NC_045512.2 | 3′→5′ | 16057 | 16072 |
| 698 | GCATACTCCTGATTAG | NC_045512.2 | 3′→5′ | 16058 | 16073 |
| 699 | AGCATACTCCTGATTA | NC_045512.2 | 3′→5′ | 16059 | 16074 |
| 700 | CAGCATACTCCTGATT | NC_045512.2 | 3′→5′ | 16060 | 16075 |
| 701 | TCAGCATACTCCTGAT | NC_045512.2 | 3′→5′ | 16061 | 16076 |
| 702 | ATCAGCATACTCCTGA | NC_045512.2 | 3′→5′ | 16062 | 16077 |
| 703 | CATCAGCATACTCCTG | NC_045512.2 | 3′→5′ | 16063 | 16078 |
| 704 | ACATCAGCATACTCCT | NC_045512.2 | 3′→5′ | 16064 | 16079 |
| 705 | AAAACTCAGGTTCCCA | NC_045512.2 | 3′→5′ | 16186 | 16201 |
| 706 | TAAAACTCAGGTTCCC | NC_045512.2 | 3′→5′ | 16187 | 16202 |
| 707 | ATAAAACTCAGGTTCC | NC_045512.2 | 3′→5′ | 16188 | 16203 |
| 708 | CATAAAACTCAGGTTC | NC_045512.2 | 3′→5′ | 16189 | 16204 |
| 709 | TCATAAAACTCAGGTT | NC_045512.2 | 3′→5′ | 16190 | 16205 |
| 710 | TAGCTCATACCTCCTA | NC_045512.2 | 3′→5′ | 16430 | 16445 |
| 711 | ATAGCTCATACCTCCT | NC_045512.2 | 3′→5′ | 16431 | 16446 |
| 712 | AATAGCTCATACCTCC | NC_045512.2 | 3′→5′ | 16432 | 16447 |
| 713 | TAATAGCTCATACCTC | NC_045512.2 | 3′→5′ | 16433 | 16448 |
| 714 | ATGGAAAACTAATGGG | NC_045512.2 | 3′→5′ | 16468 | 16483 |
| 715 | AATGGAAAACTAATGG | NC_045512.2 | 3′→5′ | 16469 | 16484 |
| 716 | AACCAGTAAAGACATA | NC_045512.2 | 3′→5′ | 16774 | 16789 |
| 717 | TAACCAGTAAAGACAT | NC_045512.2 | 3′→5′ | 16775 | 16790 |
| 718 | CAAAGGTGTACTCTCC | NC_045512.2 | 3′→5′ | 16822 | 16837 |
| 719 | TCAAAGGTGTACTCTC | NC_045512.2 | 3′→5′ | 16823 | 16838 |
| 720 | TTCAAAGGTGTACTCT | NC_045512.2 | 3′→5′ | 16824 | 16839 |
| 721 | TTTCAAAGGTGTACTC | NC_045512.2 | 3′→5′ | 16825 | 16840 |
| 722 | TTTTCAAAGGTGTACT | NC_045512.2 | 3′→5′ | 16826 | 16841 |
| 723 | TTTTTCAAAGGTGTAC | NC_045512.2 | 3′→5′ | 16827 | 16842 |
| 724 | CTTTTTCAAAGGTGTA | NC_045512.2 | 3′→5′ | 16828 | 16843 |
| 725 | CCTTTTTCAAAGGTGT | NC_045512.2 | 3′→5′ | 16829 | 16844 |
| 726 | ACCTTTTTCAAAGGTG | NC_045512.2 | 3′→5′ | 16830 | 16845 |
| 727 | CACCTTTTTCAAAGGT | NC_045512.2 | 3′→5′ | 16831 | 16846 |
| 728 | TCACCTTTTTCAAAGG | NC_045512.2 | 3′→5′ | 16832 | 16847 |
| 729 | GTCACCTTTTTCAAAG | NC_045512.2 | 3′→5′ | 16833 | 16848 |
| 730 | AGTCACCTTTTTCAAA | NC_045512.2 | 3′→5′ | 16834 | 16849 |
| 731 | TAGTCACCTTTTTCAA | NC_045512.2 | 3′→5′ | 16835 | 16850 |
| 732 | ATAGTCACCTTTTTCA | NC_045512.2 | 3′→5′ | 16836 | 16851 |
| 733 | CATAGTCACCTTTTTC | NC_045512.2 | 3′→5′ | 16837 | 16852 |
| 734 | CCATAGTCACCTTTTT | NC_045512.2 | 3′→5′ | 16838 | 16853 |
| 735 | ACCATAGTCACCTTTT | NC_045512.2 | 3′→5′ | 16839 | 16854 |
| 736 | CACCATAGTCACCTTT | NC_045512.2 | 3′→5′ | 16840 | 16855 |
| 737 | TCACCATAGTCACCTT | NC_045512.2 | 3′→5′ | 16841 | 16856 |
| 738 | ATCACCATAGTCACCT | NC_045512.2 | 3′→5′ | 16842 | 16857 |
| 739 | CATCACCATAGTCACC | NC_045512.2 | 3′→5′ | 16843 | 16858 |
| 740 | GCATCACCATAGTCAC | NC_045512.2 | 3′→5′ | 16844 | 16859 |
| 741 | AGCATCACCATAGTCA | NC_045512.2 | 3′→5′ | 16845 | 16860 |
| 742 | CAGCATCACCATAGTC | NC_045512.2 | 3′→5′ | 16846 | 16861 |
| 743 | ACAGCATCACCATAGT | NC_045512.2 | 3′→5′ | 16847 | 16862 |
| 744 | AACAGCATCACCATAG | NC_045512.2 | 3′→5′ | 16848 | 16863 |
| 745 | CAACAGCATCACCATA | NC_045512.2 | 3′→5′ | 16849 | 16864 |
| 746 | ACAACAGCATCACCAT | NC_045512.2 | 3′→5′ | 16850 | 16865 |
| 747 | GCTCTTGTGGCACTAG | NC_045512.2 | 3′→5′ | 16954 | 16969 |
| 748 | TGCTCTTGTGGCACTA | NC_045512.2 | 3′→5′ | 16955 | 16970 |
| 749 | GTGCTCTTGTGGCACT | NC_045512.2 | 3′→5′ | 16956 | 16971 |
| 750 | AGTGCTCTTGTGGCAC | NC_045512.2 | 3′→5′ | 16957 | 16972 |
| 751 | TAGTGCTCTTGTGGCA | NC_045512.2 | 3′→5′ | 16958 | 16973 |
| 752 | ATAGTGCTCTTGTGGC | NC_045512.2 | 3′→5′ | 16959 | 16974 |
| 753 | CATAGTGCTCTTGTGG | NC_045512.2 | 3′→5′ | 16960 | 16975 |
| 754 | ACATAGTGCTCTTGTG | NC_045512.2 | 3′→5′ | 16961 | 16976 |
| 755 | AAAACTCATCTGAGAT | NC_045512.2 | 3′→5′ | 17008 | 17023 |
| 756 | GAAAACTCATCTGAGA | NC_045512.2 | 3′→5′ | 17009 | 17024 |
| 757 | AGAAAACTCATCTGAG | NC_045512.2 | 3′→5′ | 17010 | 17025 |
| 758 | TAGAAAACTCATCTGA | NC_045512.2 | 3′→5′ | 17011 | 17026 |
| 759 | CTAGAAAACTCATCTG | NC_045512.2 | 3′→5′ | 17012 | 17027 |
| 760 | GCTAGAAAACTCATCT | NC_045512.2 | 3′→5′ | 17013 | 17028 |
| 761 | TGCTAGAAAACTCATC | NC_045512.2 | 3′→5′ | 17014 | 17029 |
| 762 | TTGCTAGAAAACTCAT | NC_045512.2 | 3′→5′ | 17015 | 17030 |
| 763 | ATTGCTAGAAAACTCA | NC_045512.2 | 3′→5′ | 17016 | 17031 |
| 764 | CATTGCTAGAAAACTC | NC_045512.2 | 3′→5′ | 17017 | 17032 |
| 765 | ACATTGCTAGAAAACT | NC_045512.2 | 3′→5′ | 17018 | 17033 |
| 766 | AACATTGCTAGAAAAC | NC_045512.2 | 3′→5′ | 17019 | 17034 |
| 767 | CAACATTGCTAGAAAA | NC_045512.2 | 3′→5′ | 17020 | 17035 |
| 768 | GCAACATTGCTAGAAA | NC_045512.2 | 3′→5′ | 17021 | 17036 |
| 769 | TGCAACATTGCTAGAA | NC_045512.2 | 3′→5′ | 17022 | 17037 |
| 770 | TTGCAACATTGCTAGA | NC_045512.2 | 3′→5′ | 17023 | 17038 |
| 771 | TTTGCAACATTGCTAG | NC_045512.2 | 3′→5′ | 17024 | 17039 |
| 772 | ATTTGCAACATTGCTA | NC_045512.2 | 3′→5′ | 17025 | 17040 |
| 773 | AATTTGCAACATTGCT | NC_045512.2 | 3′→5′ | 17026 | 17041 |
| 774 | TAATTTGCAACATTGC | NC_045512.2 | 3′→5′ | 17027 | 17042 |
| 775 | CAGTACCAGGTGGTCC | NC_045512.2 | 3′→5′ | 17080 | 17095 |
| 776 | CCAGTACCAGGTGGTC | NC_045512.2 | 3′→5′ | 17081 | 17096 |
| 777 | ACCAGTACCAGGTGGT | NC_045512.2 | 3′→5′ | 17082 | 17097 |
| 778 | TACCAGTACCAGGTGG | NC_045512.2 | 3′→5′ | 17083 | 17098 |
| 779 | TTACCAGTACCAGGTG | NC_045512.2 | 3′→5′ | 17084 | 17099 |
| 780 | CTTACCAGTACCAGGT | NC_045512.2 | 3′→5′ | 17085 | 17100 |
| 781 | TCTTACCAGTACCAGG | NC_045512.2 | 3′→5′ | 17086 | 17101 |
| 782 | CTCTTACCAGTACCAG | NC_045512.2 | 3′→5′ | 17087 | 17102 |
| 783 | ACTCTTACCAGTACCA | NC_045512.2 | 3′→5′ | 17088 | 17103 |
| 784 | GACTCTTACCAGTACC | NC_045512.2 | 3′→5′ | 17089 | 17104 |
| 785 | TGACTCTTACCAGTAC | NC_045512.2 | 3′→5′ | 17090 | 17105 |
| 786 | ATGACTCTTACCAGTA | NC_045512.2 | 3′→5′ | 17091 | 17106 |
| 787 | AATGACTCTTACCAGT | NC_045512.2 | 3′→5′ | 17092 | 17107 |
| 788 | AAATGACTCTTACCAG | NC_045512.2 | 3′→5′ | 17093 | 17108 |
| 789 | AAAATGACTCTTACCA | NC_045512.2 | 3′→5′ | 17094 | 17109 |
| 790 | CAAAATGACTCTTACC | NC_045512.2 | 3′→5′ | 17095 | 17110 |
| 791 | GCAAAATGACTCTTAC | NC_045512.2 | 3′→5′ | 17096 | 17111 |
| 792 | ACACTATGCGAGCAGA | NC_045512.2 | 3′→5′ | 17137 | 17152 |
| 793 | TACACTATGCGAGCAG | NC_045512.2 | 3′→5′ | 17138 | 17153 |
| 794 | ATACACTATGCGAGCA | NC_045512.2 | 3′→5′ | 17139 | 17154 |
| 795 | TATACACTATGCGAGC | NC_045512.2 | 3′→5′ | 17140 | 17155 |
| 796 | GTATACACTATGCGAG | NC_045512.2 | 3′→5′ | 17141 | 17156 |
| 797 | AATTCACTTTGAATTT | NC_045512.2 | 3′→5′ | 17269 | 17284 |
| 798 | GAATTCACTTTGAATT | NC_045512.2 | 3′→5′ | 17270 | 17285 |
| 799 | TGAATTCACTTTGAAT | NC_045512.2 | 3′→5′ | 17271 | 17286 |
| 800 | TTGAATTCACTTTGAA | NC_045512.2 | 3′→5′ | 17272 | 17287 |
| 801 | GTTGAATTCACTTTGA | NC_045512.2 | 3′→5′ | 17273 | 17288 |
| 802 | TGTTGAATTCACTTTG | NC_045512.2 | 3′→5′ | 17274 | 17289 |
| 803 | CATTGACAACACTCAA | NC_045512.2 | 3′→5′ | 17386 | 17401 |
| 804 | GCATTGACAACACTCA | NC_045512.2 | 3′→5′ | 17387 | 17402 |
| 805 | ACATGTCTGGACCTAT | NC_045512.2 | 3′→5′ | 17530 | 17545 |
| 806 | AACATGTCTGGACCTA | NC_045512.2 | 3′→5′ | 17531 | 17546 |
| 807 | GAACATGTCTGGACCT | NC_045512.2 | 3′→5′ | 17532 | 17547 |
| 808 | GGAACATGTCTGGACC | NC_045512.2 | 3′→5′ | 17533 | 17548 |
| 809 | AGGAACATGTCTGGAC | NC_045512.2 | 3′→5′ | 17534 | 17549 |
| 810 | TTTCAGCAGGACAACG | NC_045512.2 | 3′→5′ | 17563 | 17578 |
| 811 | ATTTCAGCAGGACAAC | NC_045512.2 | 3′→5′ | 17564 | 17579 |
| 812 | AATTTCAGCAGGACAA | NC_045512.2 | 3′→5′ | 17565 | 17580 |
| 813 | CAATTTCAGCAGGACA | NC_045512.2 | 3′→5′ | 17566 | 17581 |
| 814 | ACAATTTCAGCAGGAC | NC_045512.2 | 3′→5′ | 17567 | 17582 |
| 815 | CAGATGAAACATCATG | NC_045512.2 | 3′→5′ | 17680 | 17695 |
| 816 | GCAGATGAAACATCAT | NC_045512.2 | 3′→5′ | 17681 | 17696 |
| 817 | TGCAGATGAAACATCA | NC_045512.2 | 3′→5′ | 17682 | 17697 |
| 818 | TTGCAGATGAAACATC | NC_045512.2 | 3′→5′ | 17683 | 17698 |
| 819 | ATTGCAGATGAAACAT | NC_045512.2 | 3′→5′ | 17684 | 17699 |
| 820 | CTTTTCTCCAAGCAGG | NC_045512.2 | 3′→5′ | 17746 | 17761 |
| 821 | GCTTTTCTCCAAGCAG | NC_045512.2 | 3′→5′ | 17747 | 17762 |
| 822 | AGCTTTTCTCCAAGCA | NC_045512.2 | 3′→5′ | 17748 | 17763 |
| 823 | CAGCTTTTCTCCAAGC | NC_045512.2 | 3′→5′ | 17749 | 17764 |
| 824 | ACAGCTTTTCTCCAAG | NC_045512.2 | 3′→5′ | 17750 | 17765 |
| 825 | ATATGACATAGTCATA | NC_045512.2 | 3′→5′ | 17857 | 17872 |
| 826 | AATATGACATAGTCAT | NC_045512.2 | 3′→5′ | 17858 | 17873 |
| 827 | GAATATGACATAGTCA | NC_045512.2 | 3′→5′ | 17859 | 17874 |
| 828 | TGAATATGACATAGTC | NC_045512.2 | 3′→5′ | 17860 | 17875 |
| 829 | GTGAATATGACATAGT | NC_045512.2 | 3′→5′ | 17861 | 17876 |
| 830 | TATCAGACATTATGCA | NC_045512.2 | 3′→5′ | 17956 | 17971 |
| 831 | CTATCAGACATTATGC | NC_045512.2 | 3′→5′ | 17957 | 17972 |
| 832 | TCTATCAGACATTATG | NC_045512.2 | 3′→5′ | 17958 | 17973 |
| 833 | CTCTATCAGACATTAT | NC_045512.2 | 3′→5′ | 17959 | 17974 |
| 834 | TCTCTATCAGACATTA | NC_045512.2 | 3′→5′ | 17960 | 17975 |
| 835 | GTGTAGGTGCCTGTGT | NC_045512.2 | 3′→5′ | 18100 | 18115 |
| 836 | TGTGTAGGTGCCTGTG | NC_045512.2 | 3′→5′ | 18101 | 18116 |
| 837 | GTGTGTAGGTGCCTGT | NC_045512.2 | 3′→5′ | 18102 | 18117 |
| 838 | GGTGTGTAGGTGCCTG | NC_045512.2 | 3′→5′ | 18103 | 18118 |
| 839 | AGGTGTGTAGGTGCCT | NC_045512.2 | 3′→5′ | 18104 | 18119 |
| 840 | GAGGTGTGTAGGTGCC | NC_045512.2 | 3′→5′ | 18105 | 18120 |
| 841 | TGAGGTGTGTAGGTGC | NC_045512.2 | 3′→5′ | 18106 | 18121 |
| 842 | CTGAGGTGTGTAGGTG | NC_045512.2 | 3′→5′ | 18107 | 18122 |
| 843 | TCATAGAGATGAGTCT | NC_045512.2 | 3′→5′ | 18196 | 18211 |
| 844 | ATCATAGAGATGAGTC | NC_045512.2 | 3′→5′ | 18197 | 18212 |
| 845 | CATCATAGAGATGAGT | NC_045512.2 | 3′→5′ | 18198 | 18213 |
| 846 | CCATCATAGAGATGAG | NC_045512.2 | 3′→5′ | 18199 | 18214 |
| 847 | CCCATCATAGAGATGA | NC_045512.2 | 3′→5′ | 18200 | 18215 |
| 848 | ACCCATCATAGAGATG | NC_045512.2 | 3′→5′ | 18201 | 18216 |
| 849 | AACCCATCATAGAGAT | NC_045512.2 | 3′→5′ | 18202 | 18217 |
| 850 | AAACCCATCATAGAGA | NC_045512.2 | 3′→5′ | 18203 | 18218 |
| 851 | GCTTAACAAAGCACTC | NC_045512.2 | 3′→5′ | 18889 | 18904 |
| 852 | CGCTTAACAAAGCACT | NC_045512.2 | 3′→5′ | 18890 | 18905 |
| 853 | CATTTTCTAAACTCTG | NC_045512.2 | 3′→5′ | 19618 | 19633 |
| 854 | ACATTTTCTAAACTCT | NC_045512.2 | 3′→5′ | 19619 | 19634 |
| 855 | CACATTTTCTAAACTC | NC_045512.2 | 3′→5′ | 19620 | 19635 |
| 856 | CCACATTTTCTAAACT | NC_045512.2 | 3′→5′ | 19621 | 19636 |
| 857 | GCCACATTTTCTAAAC | NC_045512.2 | 3′→5′ | 19622 | 19637 |
| 858 | AGCCACATTTTCTAAA | NC_045512.2 | 3′→5′ | 19623 | 19638 |
| 859 | AAGCCACATTTTCTAA | NC_045512.2 | 3′→5′ | 19624 | 19639 |
| 860 | GTCCATCAAAGTGTCC | NC_045512.2 | 3′→5′ | 19657 | 19672 |
| 861 | TGTCCATCAAAGTGTC | NC_045512.2 | 3′→5′ | 19658 | 19673 |
| 862 | TAGCCCAAAGCTCAAA | NC_045512.2 | 3′→5′ | 19783 | 19798 |
| 863 | TTAGCCCAAAGCTCAA | NC_045512.2 | 3′→5′ | 19784 | 19799 |
| 864 | CTTAGCCCAAAGCTCA | NC_045512.2 | 3′→5′ | 19785 | 19800 |
| 865 | GCTTAGCCCAAAGCTC | NC_045512.2 | 3′→5′ | 19786 | 19801 |
| 866 | CGCTTAGCCCAAAGCT | NC_045512.2 | 3′→5′ | 19787 | 19802 |
| 867 | CCAAATTATTGAGTAT | NC_045512.2 | 3′→5′ | 19831 | 19846 |
| 868 | CCCAAATTATTGAGTA | NC_045512.2 | 3′→5′ | 19832 | 19847 |
| 869 | ACCCAAATTATTGAGT | NC_045512.2 | 3′→5′ | 19833 | 19848 |
| 870 | CACCCAAATTATTGAG | NC_045512.2 | 3′→5′ | 19834 | 19849 |
| 871 | ACACCCAAATTATTGA | NC_045512.2 | 3′→5′ | 19835 | 19850 |
| 872 | TTAATGTGACTCCATT | NC_045512.2 | 3′→5′ | 20107 | 20122 |
| 873 | ATTAATGTGACTCCAT | NC_045512.2 | 3′→5′ | 20108 | 20123 |
| 874 | AATTAATGTGACTCCA | NC_045512.2 | 3′→5′ | 20109 | 20124 |
| 875 | CAATTAATGTGACTCC | NC_045512.2 | 3′→5′ | 20110 | 20125 |
| 876 | CCAATTAATGTGACTC | NC_045512.2 | 3′→5′ | 20111 | 20126 |
| 877 | TCCAATTAATGTGACT | NC_045512.2 | 3′→5′ | 20112 | 20127 |
| 878 | CTCCAATTAATGTGAC | NC_045512.2 | 3′→5′ | 20113 | 20128 |
| 879 | TCTCCAATTAATGTGA | NC_045512.2 | 3′→5′ | 20114 | 20129 |
| 880 | TTCTCCAATTAATGTG | NC_045512.2 | 3′→5′ | 20115 | 20130 |
| 881 | CGACATTCATCATTAT | NC_045512.2 | 3′→5′ | 20776 | 20791 |
| 882 | GCGACATTCATCATTA | NC_045512.2 | 3′→5′ | 20777 | 20792 |
| 883 | TGCGACATTCATCATT | NC_045512.2 | 3′→5′ | 20778 | 20793 |
| 884 | TTGCGACATTCATCAT | NC_045512.2 | 3′→5′ | 20779 | 20794 |
| 885 | TTTGCGACATTCATCA | NC_045512.2 | 3′→5′ | 20780 | 20795 |
| 886 | CAGCATTCCAAGAATG | NC_045512.2 | 3′→5′ | 21178 | 21193 |
| 887 | TCAGCATTCCAAGAAT | NC_045512.2 | 3′→5′ | 21179 | 21194 |
| 888 | CAATTAAAAATGCTTC | NC_045512.2 | 3′→5′ | 21265 | 21280 |
| 889 | CCAATTAAAAATGCTT | NC_045512.2 | 3′→5′ | 21266 | 21281 |
| 890 | TGTTGTTTTCTCTAAT | NC_045512.2 | 3′→5′ | 21502 | 21517 |
| 891 | CTGTTGTTTTCTCTAA | NC_045512.2 | 3′→5′ | 21503 | 21518 |
| 892 | TCTGTTGTTTTCTCTA | NC_045512.2 | 3′→5′ | 21504 | 21519 |
| 893 | CTCTGTTGTTTTCTCT | NC_045512.2 | 3′→5′ | 21505 | 21520 |
| 894 | ACTCTGTTGTTTTCTC | NC_045512.2 | 3′→5′ | 21506 | 21521 |
| 895 | AACTCTGTTGTTTTCT | NC_045512.2 | 3′→5′ | 21507 | 21522 |
| 896 | CAACTCTGTTGTTTTC | NC_045512.2 | 3′→5′ | 21508 | 21523 |
| 897 | ACAACTCTGTTGTTTT | NC_045512.2 | 3′→5′ | 21509 | 21524 |
| 898 | ATATTTGTGAAAAATT | NC_045512.2 | 3′→5′ | 23963 | 23978 |
| 899 | AATATTTGTGAAAAAT | NC_045512.2 | 3′→5′ | 23964 | 23979 |
| 900 | CCATTTGCATAGCAAA | NC_045512.2 | 3′→5′ | 24254 | 24269 |
| 901 | GCCATTTGCATAGCAA | NC_045512.2 | 3′→5′ | 24255 | 24270 |
| 902 | TCTCATAGAGAACATT | NC_045512.2 | 3′→5′ | 24302 | 24317 |
| 903 | TTCTCATAGAGAACAT | NC_045512.2 | 3′→5′ | 24303 | 24318 |
| 904 | GTTCTCATAGAGAACA | NC_045512.2 | 3′→5′ | 24304 | 24319 |
| 905 | GGTTCTCATAGAGAAC | NC_045512.2 | 3′→5′ | 24305 | 24320 |
| 906 | TGGTTCTCATAGAGAA | NC_045512.2 | 3′→5′ | 24306 | 24321 |
| 907 | TTGGTTCTCATAGAGA | NC_045512.2 | 3′→5′ | 24307 | 24322 |
| 908 | TTTGGTTCTCATAGAG | NC_045512.2 | 3′→5′ | 24308 | 24323 |
| 909 | TTTTGGTTCTCATAGA | NC_045512.2 | 3′→5′ | 24309 | 24324 |
| 910 | TTTTTGGTTCTCATAG | NC_045512.2 | 3′→5′ | 24310 | 24325 |
| 911 | TAAGTTGTTTAACAAG | NC_045512.2 | 3′→5′ | 24446 | 24461 |
| 912 | CTAAGTTGTTTAACAA | NC_045512.2 | 3′→5′ | 24447 | 24462 |
| 913 | GCTAAGTTGTTTAACA | NC_045512.2 | 3′→5′ | 24448 | 24463 |
| 914 | AGCTAAGTTGTTTAAC | NC_045512.2 | 3′→5′ | 24449 | 24464 |
| 915 | GAGCTAAGTTGTTTAA | NC_045512.2 | 3′→5′ | 24450 | 24465 |
| 916 | CAAGATTAGCAGAAGC | NC_045512.2 | 3′→5′ | 24620 | 24635 |
| 917 | GCAAGATTAGCAGAAG | NC_045512.2 | 3′→5′ | 24621 | 24636 |
| 918 | AGCAAGATTAGCAGAA | NC_045512.2 | 3′→5′ | 24622 | 24637 |
| 919 | CAGCAAGATTAGCAGA | NC_045512.2 | 3′→5′ | 24623 | 24638 |
| 920 | GCAGCAAGATTAGCAG | NC_045512.2 | 3′→5′ | 24624 | 24639 |
| 921 | AGCAGCAAGATTAGCA | NC_045512.2 | 3′→5′ | 24625 | 24640 |
| 922 | TAGCAGCAAGATTAGC | NC_045512.2 | 3′→5′ | 24626 | 24641 |
| 923 | GTAGCAGCAAGATTAG | NC_045512.2 | 3′→5′ | 24627 | 24642 |
| 924 | AGTAGCAGCAAGATTA | NC_045512.2 | 3′→5′ | 24628 | 24643 |
| 925 | TAGTAGCAGCAAGATT | NC_045512.2 | 3′→5′ | 24629 | 24644 |
| 926 | TTAGTAGCAGCAAGAT | NC_045512.2 | 3′→5′ | 24630 | 24645 |
| 927 | TTTAGTAGCAGCAAGA | NC_045512.2 | 3′→5′ | 24631 | 24646 |
| 928 | TTTTAGTAGCAGCAAG | NC_045512.2 | 3′→5′ | 24632 | 24647 |
| 929 | ATTTTAGTAGCAGCAA | NC_045512.2 | 3′→5′ | 24633 | 24648 |
| 930 | CATTTTAGTAGCAGCA | NC_045512.2 | 3′→5′ | 24634 | 24649 |
| 931 | ACATTTTAGTAGCAGC | NC_045512.2 | 3′→5′ | 24635 | 24650 |
| 932 | GACATTTTAGTAGCAG | NC_045512.2 | 3′→5′ | 24636 | 24651 |
| 933 | TTTTTGATTGTCCAAG | NC_045512.2 | 3′→5′ | 24662 | 24677 |
| 934 | CTTTTTGATTGTCCAA | NC_045512.2 | 3′→5′ | 24663 | 24678 |
| 935 | TCTTTTTGATTGTCCA | NC_045512.2 | 3′→5′ | 24664 | 24679 |
| 936 | CTCTTTTTGATTGTCC | NC_045512.2 | 3′→5′ | 24665 | 24680 |
| 937 | ACTCTTTTTGATTGTC | NC_045512.2 | 3′→5′ | 24666 | 24681 |
| 938 | AACTCTTTTTGATTGT | NC_045512.2 | 3′→5′ | 24667 | 24682 |
| 939 | CAACTCTTTTTGATTG | NC_045512.2 | 3′→5′ | 24668 | 24683 |
| 940 | TCAACTCTTTTTGATT | NC_045512.2 | 3′→5′ | 24669 | 24684 |
| 941 | CTGGTGATGTATGATT | NC_045512.2 | 3′→5′ | 25034 | 25049 |
| 942 | TCTGGTGATGTATGAT | NC_045512.2 | 3′→5′ | 25035 | 25050 |
| 943 | ATCTGGTGATGTATGA | NC_045512.2 | 3′→5′ | 25036 | 25051 |
| 944 | CATCTGGTGATGTATG | NC_045512.2 | 3′→5′ | 25037 | 25052 |
| 945 | ACATCTGGTGATGTAT | NC_045512.2 | 3′→5′ | 25038 | 25053 |
| 946 | AACATCTGGTGATGTA | NC_045512.2 | 3′→5′ | 25039 | 25054 |
| 947 | CAACATCTGGTGATGT | NC_045512.2 | 3′→5′ | 25040 | 25055 |
| 948 | TCAACATCTGGTGATG | NC_045512.2 | 3′→5′ | 25041 | 25056 |
| 949 | ATCAACATCTGGTGAT | NC_045512.2 | 3′→5′ | 25042 | 25057 |
| 950 | AGGCGGTCAATTTCTT | NC_045512.2 | 3′→5′ | 25104 | 25119 |
| 951 | GAGGCGGTCAATTTCT | NC_045512.2 | 3′→5′ | 25105 | 25120 |
| 952 | TGAGGCGGTCAATTTC | NC_045512.2 | 3′→5′ | 25106 | 25121 |
| 953 | TTGAGGCGGTCAATTT | NC_045512.2 | 3′→5′ | 25107 | 25122 |
| 954 | ATTGAGGCGGTCAATT | NC_045512.2 | 3′→5′ | 25108 | 25123 |
| 955 | CATTGAGGCGGTCAAT | NC_045512.2 | 3′→5′ | 25109 | 25124 |
| 956 | TCATTGAGGCGGTCAA | NC_045512.2 | 3′→5′ | 25110 | 25125 |
| 957 | CTCATTGAGGCGGTCA | NC_045512.2 | 3′→5′ | 25111 | 25126 |
| 958 | CCTCATTGAGGCGGTC | NC_045512.2 | 3′→5′ | 25112 | 25127 |
| 959 | ACCTCATTGAGGCGGT | NC_045512.2 | 3′→5′ | 25113 | 25128 |
| 960 | TGTAATGTAATTTGAC | NC_045512.2 | 3′→5′ | 25364 | 25379 |
| 961 | GTGTAATGTAATTTGA | NC_045512.2 | 3′→5′ | 25365 | 25380 |
| 962 | TGTGTAATGTAATTTG | NC_045512.2 | 3′→5′ | 25366 | 25381 |
| 963 | ATGTGTAATGTAATTT | NC_045512.2 | 3′→5′ | 25367 | 25382 |
| 964 | TATGTGTAATGTAATT | NC_045512.2 | 3′→5′ | 25368 | 25383 |
| 965 | TTATGTGTAATGTAAT | NC_045512.2 | 3′→5′ | 25369 | 25384 |
| 966 | TTTATGTGTAATGTAA | NC_045512.2 | 3′→5′ | 25370 | 25385 |
| 967 | GTTTATGTGTAATGTA | NC_045512.2 | 3′→5′ | 25371 | 25386 |
| 968 | CGTTTATGTGTAATGT | NC_045512.2 | 3′→5′ | 25372 | 25387 |
| 969 | GGGAGTGAGGCTTGTA | NC_045512.2 | 3′→5′ | 25502 | 25517 |
| 970 | AGGGAGTGAGGCTTGT | NC_045512.2 | 3′→5′ | 25503 | 25518 |
| 971 | AAGGGAGTGAGGCTTG | NC_045512.2 | 3′→5′ | 25504 | 25519 |
| 972 | AAAGGGAGTGAGGCTT | NC_045512.2 | 3′→5′ | 25505 | 25520 |
| 973 | GAAAGGGAGTGAGGCT | NC_045512.2 | 3′→5′ | 25506 | 25521 |
| 974 | CGAAAGGGAGTGAGGC | NC_045512.2 | 3′→5′ | 25507 | 25522 |
| 975 | CCGAAAGGGAGTGAGG | NC_045512.2 | 3′→5′ | 25508 | 25523 |
| 976 | TCCGAAAGGGAGTGAG | NC_045512.2 | 3′→5′ | 25509 | 25524 |
| 977 | ATCCGAAAGGGAGTGA | NC_045512.2 | 3′→5′ | 25510 | 25525 |
| 978 | CATCCGAAAGGGAGTG | NC_045512.2 | 3′→5′ | 25511 | 25526 |
| 979 | CCATCCGAAAGGGAGT | NC_045512.2 | 3′→5′ | 25512 | 25527 |
| 980 | GCCATCCGAAAGGGAG | NC_045512.2 | 3′→5′ | 25513 | 25528 |
| 981 | AGCCATCCGAAAGGGA | NC_045512.2 | 3′→5′ | 25514 | 25529 |
| 982 | AAGCCATCCGAAAGGG | NC_045512.2 | 3′→5′ | 25515 | 25530 |
| 983 | TGAAAAACAGCAAGAA | NC_045512.2 | 3′→5′ | 25547 | 25562 |
| 984 | TAGTAGTCGTCGTCGG | NC_045512.2 | 3′→5′ | 26191 | 26206 |
| 985 | CTAGTAGTCGTCGTCG | NC_045512.2 | 3′→5′ | 26192 | 26207 |
| 986 | GCTAGTAGTCGTCGTC | NC_045512.2 | 3′→5′ | 26193 | 26208 |
| 987 | CGCTAGTAGTCGTCGT | NC_045512.2 | 3′→5′ | 26194 | 26209 |
| 988 | ACGCTAGTAGTCGTCG | NC_045512.2 | 3′→5′ | 26195 | 26210 |
| 989 | CACGCTAGTAGTCGTC | NC_045512.2 | 3′→5′ | 26196 | 26211 |
| 990 | GCACGCTAGTAGTCGT | NC_045512.2 | 3′→5′ | 26197 | 26212 |
| 991 | GGCACGCTAGTAGTCG | NC_045512.2 | 3′→5′ | 26198 | 26213 |
| 992 | AGGCACGCTAGTAGTC | NC_045512.2 | 3′→5′ | 26199 | 26214 |
| 993 | AAGGCACGCTAGTAGT | NC_045512.2 | 3′→5′ | 26200 | 26215 |
| 994 | AAAGGCACGCTAGTAG | NC_045512.2 | 3′→5′ | 26201 | 26216 |
| 995 | CAAAGGCACGCTAGTA | NC_045512.2 | 3′→5′ | 26202 | 26217 |
| 996 | ACAAAGGCACGCTAGT | NC_045512.2 | 3′→5′ | 26203 | 26218 |
| 997 | TACAAAGGCACGCTAG | NC_045512.2 | 3′→5′ | 26204 | 26219 |
| 998 | TTACAAAGGCACGCTA | NC_045512.2 | 3′→5′ | 26205 | 26220 |
| 999 | CTTACAAAGGCACGCT | NC_045512.2 | 3′→5′ | 26206 | 26221 |
| 1000 | GCTTACAAAGGCACGC | NC_045512.2 | 3′→5′ | 26207 | 26222 |
| 1001 | TGCTTACAAAGGCACG | NC_045512.2 | 3′→5′ | 26208 | 26223 |
| 1002 | GTGCTTACAAAGGCAC | NC_045512.2 | 3′→5′ | 26209 | 26224 |
| 1003 | TGTGCTTACAAAGGCA | NC_045512.2 | 3′→5′ | 26210 | 26225 |
| 1004 | TTGTGCTTACAAAGGC | NC_045512.2 | 3′→5′ | 26211 | 26226 |
| 1005 | CTTGTGCTTACAAAGG | NC_045512.2 | 3′→5′ | 26212 | 26227 |
| 1006 | CATAAGTTCGTACTCA | NC_045512.2 | 3′→5′ | 26232 | 26247 |
| 1007 | ACATAAGTTCGTACTC | NC_045512.2 | 3′→5′ | 26233 | 26248 |
| 1008 | TACATAAGTTCGTACT | NC_045512.2 | 3′→5′ | 26234 | 26249 |
| 1009 | GTACATAAGTTCGTAC | NC_045512.2 | 3′→5′ | 26235 | 26250 |
| 1010 | AGTACATAAGTTCGTA | NC_045512.2 | 3′→5′ | 26236 | 26251 |
| 1011 | GAGTACATAAGTTCGT | NC_045512.2 | 3′→5′ | 26237 | 26252 |
| 1012 | TGAGTACATAAGTTCG | NC_045512.2 | 3′→5′ | 26238 | 26253 |
| 1013 | ATGAGTACATAAGTTC | NC_045512.2 | 3′→5′ | 26239 | 26254 |
| 1014 | AATGAGTACATAAGTT | NC_045512.2 | 3′→5′ | 26240 | 26255 |
| 1015 | GAATGAGTACATAAGT | NC_045512.2 | 3′→5′ | 26241 | 26256 |
| 1016 | CGAATGAGTACATAAG | NC_045512.2 | 3′→5′ | 26242 | 26257 |
| 1017 | ACGAATGAGTACATAA | NC_045512.2 | 3′→5′ | 26243 | 26258 |
| 1018 | AACGAATGAGTACATA | NC_045512.2 | 3′→5′ | 26244 | 26259 |
| 1019 | AAACGAATGAGTACAT | NC_045512.2 | 3′→5′ | 26245 | 26260 |
| 1020 | GAAACGAATGAGTACA | NC_045512.2 | 3′→5′ | 26246 | 26261 |
| 1021 | CGAAACGAATGAGTAC | NC_045512.2 | 3′→5′ | 26247 | 26262 |
| 1022 | CCGAAACGAATGAGTA | NC_045512.2 | 3′→5′ | 26248 | 26263 |
| 1023 | TCCGAAACGAATGAGT | NC_045512.2 | 3′→5′ | 26249 | 26264 |
| 1024 | TTCCGAAACGAATGAG | NC_045512.2 | 3′→5′ | 26250 | 26265 |
| 1025 | CTTCCGAAACGAATGA | NC_045512.2 | 3′→5′ | 26251 | 26266 |
| 1026 | TCTTCCGAAACGAATG | NC_045512.2 | 3′→5′ | 26252 | 26267 |
| 1027 | CTATTAACGTACCTGT | NC_045512.2 | 3′→5′ | 26269 | 26284 |
| 1028 | ACTATTAACGTACCTG | NC_045512.2 | 3′→5′ | 26270 | 26285 |
| 1029 | AACTATTAACGTACCT | NC_045512.2 | 3′→5′ | 26271 | 26286 |
| 1030 | TAACTATTAACGTACC | NC_045512.2 | 3′→5′ | 26272 | 26287 |
| 1031 | TTAACTATTAACGTAC | NC_045512.2 | 3′→5′ | 26273 | 26288 |
| 1032 | ATTAACTATTAACGTA | NC_045512.2 | 3′→5′ | 26274 | 26289 |
| 1033 | TATTAACTATTAACGT | NC_045512.2 | 3′→5′ | 26275 | 26290 |
| 1034 | CTATTAACTATTAACG | NC_045512.2 | 3′→5′ | 26276 | 26291 |
| 1035 | GCTATTAACTATTAAC | NC_045512.2 | 3′→5′ | 26277 | 26292 |
| 1036 | CGCTATTAACTATTAA | NC_045512.2 | 3′→5′ | 26278 | 26293 |
| 1037 | ACGCTATTAACTATTA | NC_045512.2 | 3′→5′ | 26279 | 26294 |
| 1038 | TACGCTATTAACTATT | NC_045512.2 | 3′→5′ | 26280 | 26295 |
| 1039 | GTACGCTATTAACTAT | NC_045512.2 | 3′→5′ | 26281 | 26296 |
| 1040 | AGTACGCTATTAACTA | NC_045512.2 | 3′→5′ | 26282 | 26297 |
| 1041 | AAGTACGCTATTAACT | NC_045512.2 | 3′→5′ | 26283 | 26298 |
| 1042 | GAAGTACGCTATTAAC | NC_045512.2 | 3′→5′ | 26284 | 26299 |
| 1043 | AGAAGTACGCTATTAA | NC_045512.2 | 3′→5′ | 26285 | 26300 |
| 1044 | AAGAAGTACGCTATTA | NC_045512.2 | 3′→5′ | 26286 | 26301 |
| 1045 | AAAGAAGTACGCTATT | NC_045512.2 | 3′→5′ | 26287 | 26302 |
| 1046 | AAAAGAAGTACGCTAT | NC_045512.2 | 3′→5′ | 26288 | 26303 |
| 1047 | AAAAAGAAGTACGCTA | NC_045512.2 | 3′→5′ | 26289 | 26304 |
| 1048 | GAAAAAGAAGTACGCT | NC_045512.2 | 3′→5′ | 26290 | 26305 |
| 1049 | AGAAAAAGAAGTACGC | NC_045512.2 | 3′→5′ | 26291 | 26306 |
| 1050 | AAGAAAAAGAAGTACG | NC_045512.2 | 3′→5′ | 26292 | 26307 |
| 1051 | CAAGAAAAAGAAGTAC | NC_045512.2 | 3′→5′ | 26293 | 26308 |
| 1052 | GCAAGAAAAAGAAGTA | NC_045512.2 | 3′→5′ | 26294 | 26309 |
| 1053 | AGCAAGAAAAAGAAGT | NC_045512.2 | 3′→5′ | 26295 | 26310 |
| 1054 | AAGCAAGAAAAAGAAG | NC_045512.2 | 3′→5′ | 26296 | 26311 |
| 1055 | AAAGCAAGAAAAAGAA | NC_045512.2 | 3′→5′ | 26297 | 26312 |
| 1056 | GAAAGCAAGAAAAAGA | NC_045512.2 | 3′→5′ | 26298 | 26313 |
| 1057 | CGAAAGCAAGAAAAAG | NC_045512.2 | 3′→5′ | 26299 | 26314 |
| 1058 | ACGAAAGCAAGAAAAA | NC_045512.2 | 3′→5′ | 26300 | 26315 |
| 1059 | CACGAAAGCAAGAAAA | NC_045512.2 | 3′→5′ | 26301 | 26316 |
| 1060 | CCACGAAAGCAAGAAA | NC_045512.2 | 3′→5′ | 26302 | 26317 |
| 1061 | ACCACGAAAGCAAGAA | NC_045512.2 | 3′→5′ | 26303 | 26318 |
| 1062 | TACCACGAAAGCAAGA | NC_045512.2 | 3′→5′ | 26304 | 26319 |
| 1063 | ATACCACGAAAGCAAG | NC_045512.2 | 3′→5′ | 26305 | 26320 |
| 1064 | AATACCACGAAAGCAA | NC_045512.2 | 3′→5′ | 26306 | 26321 |
| 1065 | GAATACCACGAAAGCA | NC_045512.2 | 3′→5′ | 26307 | 26322 |
| 1066 | AGAATACCACGAAAGC | NC_045512.2 | 3′→5′ | 26308 | 26323 |
| 1067 | AAGAATACCACGAAAG | NC_045512.2 | 3′→5′ | 26309 | 26324 |
| 1068 | CAAGAATACCACGAAA | NC_045512.2 | 3′→5′ | 26310 | 26325 |
| 1069 | GCAAGAATACCACGAA | NC_045512.2 | 3′→5′ | 26311 | 26326 |
| 1070 | AGCAAGAATACCACGA | NC_045512.2 | 3′→5′ | 26312 | 26327 |
| 1071 | TAGCAAGAATACCACG | NC_045512.2 | 3′→5′ | 26313 | 26328 |
| 1072 | CTAGCAAGAATACCAC | NC_045512.2 | 3′→5′ | 26314 | 26329 |
| 1073 | ACTAGCAAGAATACCA | NC_045512.2 | 3′→5′ | 26315 | 26330 |
| 1074 | TAAGGATGGCTAGTGT | NC_045512.2 | 3′→5′ | 26332 | 26347 |
| 1075 | GTAAGGATGGCTAGTG | NC_045512.2 | 3′→5′ | 26333 | 26348 |
| 1076 | AGTAAGGATGGCTAGT | NC_045512.2 | 3′→5′ | 26334 | 26349 |
| 1077 | CAGTAAGGATGGCTAG | NC_045512.2 | 3′→5′ | 26335 | 26350 |
| 1078 | GCAGTAAGGATGGCTA | NC_045512.2 | 3′→5′ | 26336 | 26351 |
| 1079 | CGCAGTAAGGATGGCT | NC_045512.2 | 3′→5′ | 26337 | 26352 |
| 1080 | GCGCAGTAAGGATGGC | NC_045512.2 | 3′→5′ | 26338 | 26353 |
| 1081 | AGCGCAGTAAGGATGG | NC_045512.2 | 3′→5′ | 26339 | 26354 |
| 1082 | AAGCGCAGTAAGGATG | NC_045512.2 | 3′→5′ | 26340 | 26355 |
| 1083 | GAAGCGCAGTAAGGAT | NC_045512.2 | 3′→5′ | 26341 | 26356 |
| 1084 | CGAAGCGCAGTAAGGA | NC_045512.2 | 3′→5′ | 26342 | 26357 |
| 1085 | TCGAAGCGCAGTAAGG | NC_045512.2 | 3′→5′ | 26343 | 26358 |
| 1086 | ATCGAAGCGCAGTAAG | NC_045512.2 | 3′→5′ | 26344 | 26359 |
| 1087 | AATCGAAGCGCAGTAA | NC_045512.2 | 3′→5′ | 26345 | 26360 |
| 1088 | CAATCGAAGCGCAGTA | NC_045512.2 | 3′→5′ | 26346 | 26361 |
| 1089 | ACAATCGAAGCGCAGT | NC_045512.2 | 3′→5′ | 26347 | 26362 |
| 1090 | CACAATCGAAGCGCAG | NC_045512.2 | 3′→5′ | 26348 | 26363 |
| 1091 | ACACAATCGAAGCGCA | NC_045512.2 | 3′→5′ | 26349 | 26364 |
| 1092 | CACACAATCGAAGCGC | NC_045512.2 | 3′→5′ | 26350 | 26365 |
| 1093 | GCACACAATCGAAGCG | NC_045512.2 | 3′→5′ | 26351 | 26366 |
| 1094 | CGCACACAATCGAAGC | NC_045512.2 | 3′→5′ | 26352 | 26367 |
| 1095 | ACGCACACAATCGAAG | NC_045512.2 | 3′→5′ | 26353 | 26368 |
| 1096 | TACGCACACAATCGAA | NC_045512.2 | 3′→5′ | 26354 | 26369 |
| 1097 | GTACGCACACAATCGA | NC_045512.2 | 3′→5′ | 26355 | 26370 |
| 1098 | AGTACGCACACAATCG | NC_045512.2 | 3′→5′ | 26356 | 26371 |
| 1099 | CAGTACGCACACAATC | NC_045512.2 | 3′→5′ | 26357 | 26372 |
| 1100 | GCAGTACGCACACAAT | NC_045512.2 | 3′→5′ | 26358 | 26373 |
| 1101 | AGCAGTACGCACACAA | NC_045512.2 | 3′→5′ | 26359 | 26374 |
| 1102 | CAGCAGTACGCACACA | NC_045512.2 | 3′→5′ | 26360 | 26375 |
| 1103 | GCAGCAGTACGCACAC | NC_045512.2 | 3′→5′ | 26361 | 26376 |
| 1104 | TGCAGCAGTACGCACA | NC_045512.2 | 3′→5′ | 26362 | 26377 |
| 1105 | TTGCAGCAGTACGCAC | NC_045512.2 | 3′→5′ | 26363 | 26378 |
| 1106 | ATTGCAGCAGTACGCA | NC_045512.2 | 3′→5′ | 26364 | 26379 |
| 1107 | TATTGCAGCAGTACGC | NC_045512.2 | 3′→5′ | 26365 | 26380 |
| 1108 | ATATTGCAGCAGTACG | NC_045512.2 | 3′→5′ | 26366 | 26381 |
| 1109 | AATATTGCAGCAGTAC | NC_045512.2 | 3′→5′ | 26367 | 26382 |
| 1110 | CAATATTGCAGCAGTA | NC_045512.2 | 3′→5′ | 26368 | 26383 |
| 1111 | ACAATATTGCAGCAGT | NC_045512.2 | 3′→5′ | 26369 | 26384 |
| 1112 | AACAATATTGCAGCAG | NC_045512.2 | 3′→5′ | 26370 | 26385 |
| 1113 | TAACAATATTGCAGCA | NC_045512.2 | 3′→5′ | 26371 | 26386 |
| 1114 | TTAACAATATTGCAGC | NC_045512.2 | 3′→5′ | 26372 | 26387 |
| 1115 | GTTAACAATATTGCAG | NC_045512.2 | 3′→5′ | 26373 | 26388 |
| 1116 | CGTTAACAATATTGCA | NC_045512.2 | 3′→5′ | 26374 | 26389 |
| 1117 | ACGTTAACAATATTGC | NC_045512.2 | 3′→5′ | 26375 | 26390 |
| 1118 | CACGTTAACAATATTG | NC_045512.2 | 3′→5′ | 26376 | 26391 |
| 1119 | TCACGTTAACAATATT | NC_045512.2 | 3′→5′ | 26377 | 26392 |
| 1120 | CTCACGTTAACAATAT | NC_045512.2 | 3′→5′ | 26378 | 26393 |
| 1121 | ACTCACGTTAACAATA | NC_045512.2 | 3′→5′ | 26379 | 26394 |
| 1122 | TCAGATTTTTAACACG | NC_045512.2 | 3′→5′ | 26425 | 26440 |
| 1123 | TTCAGATTTTTAACAC | NC_045512.2 | 3′→5′ | 26426 | 26441 |
| 1124 | AGAAGATCAGGAACTC | NC_045512.2 | 3′→5′ | 26450 | 26465 |
| 1125 | CAGAAGATCAGGAACT | NC_045512.2 | 3′→5′ | 26451 | 26466 |
| 1126 | CCAGAAGATCAGGAAC | NC_045512.2 | 3′→5′ | 26452 | 26467 |
| 1127 | ACCAGAAGATCAGGAA | NC_045512.2 | 3′→5′ | 26453 | 26468 |
| 1128 | GACCAGAAGATCAGGA | NC_045512.2 | 3′→5′ | 26454 | 26469 |
| 1129 | AGACCAGAAGATCAGG | NC_045512.2 | 3′→5′ | 26455 | 26470 |
| 1130 | TAGACCAGAAGATCAG | NC_045512.2 | 3′→5′ | 26456 | 26471 |
| 1131 | TTAGACCAGAAGATCA | NC_045512.2 | 3′→5′ | 26457 | 26472 |
| 1132 | TTTAGACCAGAAGATC | NC_045512.2 | 3′→5′ | 26458 | 26473 |
| 1133 | GTTTAGACCAGAAGAT | NC_045512.2 | 3′→5′ | 26459 | 26474 |
| 1134 | CGTTTAGACCAGAAGA | NC_045512.2 | 3′→5′ | 26460 | 26475 |
| 1135 | TCGTTTAGACCAGAAG | NC_045512.2 | 3′→5′ | 26461 | 26476 |
| 1136 | TTCGTTTAGACCAGAA | NC_045512.2 | 3′→5′ | 26462 | 26477 |
| 1137 | GTTCGTTTAGACCAGA | NC_045512.2 | 3′→5′ | 26463 | 26478 |
| 1138 | AGTTCGTTTAGACCAG | NC_045512.2 | 3′→5′ | 26464 | 26479 |
| 1139 | TAGTTCGTTTAGACCA | NC_045512.2 | 3′→5′ | 26465 | 26480 |
| 1140 | TTAGTTCGTTTAGACC | NC_045512.2 | 3′→5′ | 26466 | 26481 |
| 1141 | AAAGTTCCAAACAGAA | NC_045512.2 | 3′→5′ | 26497 | 26512 |
| 1142 | TAAAGTTCCAAACAGA | NC_045512.2 | 3′→5′ | 26498 | 26513 |
| 1143 | TTAAAGTTCCAAACAG | NC_045512.2 | 3′→5′ | 26499 | 26514 |
| 1144 | CTAGGTTCCATTGTTC | NC_045512.2 | 3′→5′ | 26574 | 26589 |
| 1145 | ACTAGGTTCCATTGTT | NC_045512.2 | 3′→5′ | 26575 | 26590 |
| 1146 | TACTAGGTTCCATTGT | NC_045512.2 | 3′→5′ | 26576 | 26591 |
| 1147 | TTACTAGGTTCCATTG | NC_045512.2 | 3′→5′ | 26577 | 26592 |
| 1148 | ATTACTAGGTTCCATT | NC_045512.2 | 3′→5′ | 26578 | 26593 |
| 1149 | TATTACTAGGTTCCAT | NC_045512.2 | 3′→5′ | 26579 | 26594 |
| 1150 | CTATTACTAGGTTCCA | NC_045512.2 | 3′→5′ | 26580 | 26595 |
| 1151 | CCTATTACTAGGTTCC | NC_045512.2 | 3′→5′ | 26581 | 26596 |
| 1152 | ACCTATTACTAGGTTC | NC_045512.2 | 3′→5′ | 26582 | 26597 |
| 1153 | AACCTATTACTAGGTT | NC_045512.2 | 3′→5′ | 26583 | 26598 |
| 1154 | AAACCTATTACTAGGT | NC_045512.2 | 3′→5′ | 26584 | 26599 |
| 1155 | GAAACCTATTACTAGG | NC_045512.2 | 3′→5′ | 26585 | 26600 |
| 1156 | CAGCAGCAAGCACAAA | NC_045512.2 | 3′→5′ | 26715 | 26730 |
| 1157 | ACAGCAGCAAGCACAA | NC_045512.2 | 3′→5′ | 26716 | 26731 |
| 1158 | GCCACATCAAGCCTAC | NC_045512.2 | 3′→5′ | 26784 | 26799 |
| 1159 | AGCCACATCAAGCCTA | NC_045512.2 | 3′→5′ | 26785 | 26800 |
| 1160 | GCGTTCGTGATGTAGC | NC_045512.2 | 3′→5′ | 27033 | 27048 |
| 1161 | AGCGTTCGTGATGTAG | NC_045512.2 | 3′→5′ | 27034 | 27049 |
| 1162 | AAGCGTTCGTGATGTA | NC_045512.2 | 3′→5′ | 27035 | 27050 |
| 1163 | AAAGCGTTCGTGATGT | NC_045512.2 | 3′→5′ | 27036 | 27051 |
| 1164 | GAAAGCGTTCGTGATG | NC_045512.2 | 3′→5′ | 27037 | 27052 |
| 1165 | AGAAAGCGTTCGTGAT | NC_045512.2 | 3′→5′ | 27038 | 27053 |
| 1166 | AAGAAAGCGTTCGTGA | NC_045512.2 | 3′→5′ | 27039 | 27054 |
| 1167 | TAAGAAAGCGTTCGTG | NC_045512.2 | 3′→5′ | 27040 | 27055 |
| 1168 | ATAAGAAAGCGTTCGT | NC_045512.2 | 3′→5′ | 27041 | 27056 |
| 1169 | AATAAGAAAGCGTTCG | NC_045512.2 | 3′→5′ | 27042 | 27057 |
| 1170 | TAATAAGAAAGCGTTC | NC_045512.2 | 3′→5′ | 27043 | 27058 |
| 1171 | GTAATAAGAAAGCGTT | NC_045512.2 | 3′→5′ | 27044 | 27059 |
| 1172 | TGTAATAAGAAAGCGT | NC_045512.2 | 3′→5′ | 27045 | 27060 |
| 1173 | TTGTAATAAGAAAGCG | NC_045512.2 | 3′→5′ | 27046 | 27061 |
| 1174 | TTTGTAATAAGAAAGC | NC_045512.2 | 3′→5′ | 27047 | 27062 |
| 1175 | ATTTGTAATAAGAAAG | NC_045512.2 | 3′→5′ | 27048 | 27063 |
| 1176 | AATTTGTAATAAGAAA | NC_045512.2 | 3′→5′ | 27049 | 27064 |
| 1177 | ATGCAGCAAAACCTGA | NC_045512.2 | 3′→5′ | 27093 | 27108 |
| 1178 | TATGCAGCAAAACCTG | NC_045512.2 | 3′→5′ | 27094 | 27109 |
| 1179 | GTATGCAGCAAAACCT | NC_045512.2 | 3′→5′ | 27095 | 27110 |
| 1180 | TGTATGCAGCAAAACC | NC_045512.2 | 3′→5′ | 27096 | 27111 |
| 1181 | GCAAAGCAATATTGTC | NC_045512.2 | 3′→5′ | 27165 | 27180 |
| 1182 | AGCAAAGCAATATTGT | NC_045512.2 | 3′→5′ | 27166 | 27181 |
| 1183 | TTGTCACTTACTGTAC | NC_045512.2 | 3′→5′ | 27183 | 27198 |
| 1184 | GTTGTCACTTACTGTA | NC_045512.2 | 3′→5′ | 27184 | 27199 |
| 1185 | TGTTGTCACTTACTGT | NC_045512.2 | 3′→5′ | 27185 | 27200 |
| 1186 | CTGTTGTCACTTACTG | NC_045512.2 | 3′→5′ | 27186 | 27201 |
| 1187 | TCTGTTGTCACTTACT | NC_045512.2 | 3′→5′ | 27187 | 27202 |
| 1188 | ATCTGTTGTCACTTAC | NC_045512.2 | 3′→5′ | 27188 | 27203 |
| 1189 | CATCTGTTGTCACTTA | NC_045512.2 | 3′→5′ | 27189 | 27204 |
| 1190 | ACATCTGTTGTCACTT | NC_045512.2 | 3′→5′ | 27190 | 27205 |
| 1191 | AACATCTGTTGTCACT | NC_045512.2 | 3′→5′ | 27191 | 27206 |
| 1192 | AAACATCTGTTGTCAC | NC_045512.2 | 3′→5′ | 27192 | 27207 |
| 1193 | GAAACATCTGTTGTCA | NC_045512.2 | 3′→5′ | 27193 | 27208 |
| 1194 | TGAAACATCTGTTGTC | NC_045512.2 | 3′→5′ | 27194 | 27209 |
| 1195 | ATGAAACATCTGTTGT | NC_045512.2 | 3′→5′ | 27195 | 27210 |
| 1196 | GATGAAACATCTGTTG | NC_045512.2 | 3′→5′ | 27196 | 27211 |
| 1197 | AGATGAAACATCTGTT | NC_045512.2 | 3′→5′ | 27197 | 27212 |
| 1198 | TCATGTTCGTTTAATC | NC_045512.2 | 3′→5′ | 27382 | 27397 |
| 1199 | TTCATGTTCGTTTAAT | NC_045512.2 | 3′→5′ | 27383 | 27398 |
| 1200 | TTTCATGTTCGTTTAA | NC_045512.2 | 3′→5′ | 27384 | 27399 |
| 1201 | TTTTCATGTTCGTTTA | NC_045512.2 | 3′→5′ | 27385 | 27400 |
| 1202 | ATTTTCATGTTCGTTT | NC_045512.2 | 3′→5′ | 27386 | 27401 |
| 1203 | AATTTTCATGTTCGTT | NC_045512.2 | 3′→5′ | 27387 | 27402 |
| 1204 | TAATTTTCATGTTCGT | NC_045512.2 | 3′→5′ | 27388 | 27403 |
| 1205 | ATAATTTTCATGTTCG | NC_045512.2 | 3′→5′ | 27389 | 27404 |
| 1206 | AATAATTTTCATGTTC | NC_045512.2 | 3′→5′ | 27390 | 27405 |
| 1207 | GAATAATTTTCATGTT | NC_045512.2 | 3′→5′ | 27391 | 27406 |
| 1208 | AGAATAATTTTCATGT | NC_045512.2 | 3′→5′ | 27392 | 27407 |
| 1209 | TACCTCTAACACACTC | NC_045512.2 | 3′→5′ | 27457 | 27472 |
| 1210 | GTACCTCTAACACACT | NC_045512.2 | 3′→5′ | 27458 | 27473 |
| 1211 | GTGAATTGCCCTCGTA | NC_045512.2 | 3′→5′ | 27511 | 27526 |
| 1212 | GGTGAATTGCCCTCGT | NC_045512.2 | 3′→5′ | 27512 | 27527 |
| 1213 | TGGTGAATTGCCCTCG | NC_045512.2 | 3′→5′ | 27513 | 27528 |
| 1214 | ATGGTGAATTGCCCTC | NC_045512.2 | 3′→5′ | 27514 | 27529 |
| 1215 | AATGGTGAATTGCCCT | NC_045512.2 | 3′→5′ | 27515 | 27530 |
| 1216 | AAATGGTGAATTGCCC | NC_045512.2 | 3′→5′ | 27516 | 27531 |
| 1217 | GAAATGGTGAATTGCC | NC_045512.2 | 3′→5′ | 27517 | 27532 |
| 1218 | TGAAATGGTGAATTGC | NC_045512.2 | 3′→5′ | 27518 | 27533 |
| 1219 | CCTCTTGTCTGATGAA | NC_045512.2 | 3′→5′ | 27652 | 27667 |
| 1220 | TCCTCTTGTCTGATGA | NC_045512.2 | 3′→5′ | 27653 | 27668 |
| 1221 | AATAGAAGTCAATTAA | NC_045512.2 | 3′→5′ | 27771 | 27786 |
| 1222 | AAATAGAAGTCAATTA | NC_045512.2 | 3′→5′ | 27772 | 27787 |
| 1223 | CAAATAGAAGTCAATT | NC_045512.2 | 3′→5′ | 27773 | 27788 |
| 1224 | ACAAATAGAAGTCAAT | NC_045512.2 | 3′→5′ | 27774 | 27789 |
| 1225 | CACAAATAGAAGTCAA | NC_045512.2 | 3′→5′ | 27775 | 27790 |
| 1226 | GCACAAATAGAAGTCA | NC_045512.2 | 3′→5′ | 27776 | 27791 |
| 1227 | AGCACAAATAGAAGTC | NC_045512.2 | 3′→5′ | 27777 | 27792 |
| 1228 | AAGCACAAATAGAAGT | NC_045512.2 | 3′→5′ | 27778 | 27793 |
| 1229 | AAAGCACAAATAGAAG | NC_045512.2 | 3′→5′ | 27779 | 27794 |
| 1230 | AAAAGCACAAATAGAA | NC_045512.2 | 3′→5′ | 27780 | 27795 |
| 1231 | AAAAAGCACAAATAGA | NC_045512.2 | 3′→5′ | 27781 | 27796 |
| 1232 | TAAAAAGCACAAATAG | NC_045512.2 | 3′→5′ | 27782 | 27797 |
| 1233 | CTAAAAAGCACAAATA | NC_045512.2 | 3′→5′ | 27783 | 27798 |
| 1234 | GCTAAAAAGCACAAAT | NC_045512.2 | 3′→5′ | 27784 | 27799 |
| 1235 | GGCTAAAAAGCACAAA | NC_045512.2 | 3′→5′ | 27785 | 27800 |
| 1236 | AGGCTAAAAAGCACAA | NC_045512.2 | 3′→5′ | 27786 | 27801 |
| 1237 | AAGGCTAAAAAGCACA | NC_045512.2 | 3′→5′ | 27787 | 27802 |
| 1238 | AAAGGCTAAAAAGCAC | NC_045512.2 | 3′→5′ | 27788 | 27803 |
| 1239 | GAAAGGCTAAAAAGCA | NC_045512.2 | 3′→5′ | 27789 | 27804 |
| 1240 | AGAAAGGCTAAAAAGC | NC_045512.2 | 3′→5′ | 27790 | 27805 |
| 1241 | CAGAAAGGCTAAAAAG | NC_045512.2 | 3′→5′ | 27791 | 27806 |
| 1242 | GCAGAAAGGCTAAAAA | NC_045512.2 | 3′→5′ | 27792 | 27807 |
| 1243 | AGCAGAAAGGCTAAAA | NC_045512.2 | 3′→5′ | 27793 | 27808 |
| 1244 | TAGCAGAAAGGCTAAA | NC_045512.2 | 3′→5′ | 27794 | 27809 |
| 1245 | ATAGCAGAAAGGCTAA | NC_045512.2 | 3′→5′ | 27795 | 27810 |
| 1246 | AATAGCAGAAAGGCTA | NC_045512.2 | 3′→5′ | 27796 | 27811 |
| 1247 | GAATAGCAGAAAGGCT | NC_045512.2 | 3′→5′ | 27797 | 27812 |
| 1248 | GGAATAGCAGAAAGGC | NC_045512.2 | 3′→5′ | 27798 | 27813 |
| 1249 | AGGAATAGCAGAAAGG | NC_045512.2 | 3′→5′ | 27799 | 27814 |
| 1250 | AAGGAATAGCAGAAAG | NC_045512.2 | 3′→5′ | 27800 | 27815 |
| 1251 | CAAGGAATAGCAGAAA | NC_045512.2 | 3′→5′ | 27801 | 27816 |
| 1252 | ACAAGGAATAGCAGAA | NC_045512.2 | 3′→5′ | 27802 | 27817 |
| 1253 | AACAAGGAATAGCAGA | NC_045512.2 | 3′→5′ | 27803 | 27818 |
| 1254 | TTTCATGTTCGTTTAG | NC_045512.2 | 3′→5′ | 27884 | 27899 |
| 1255 | ATTATCAGACATTTTA | NC_045512.2 | 3′→5′ | 28270 | 28285 |
| 1256 | CATTATCAGACATTTT | NC_045512.2 | 3′→5′ | 28271 | 28286 |
| 1257 | CCATTATCAGACATTT | NC_045512.2 | 3′→5′ | 28272 | 28287 |
| 1258 | TCCATTATCAGACATT | NC_045512.2 | 3′→5′ | 28273 | 28288 |
| 1259 | GTCCATTATCAGACAT | NC_045512.2 | 3′→5′ | 28274 | 28289 |
| 1260 | GGTCCATTATCAGACA | NC_045512.2 | 3′→5′ | 28275 | 28290 |
| 1261 | GGGTCCATTATCAGAC | NC_045512.2 | 3′→5′ | 28276 | 28291 |
| 1262 | GGGGTCCATTATCAGA | NC_045512.2 | 3′→5′ | 28277 | 28292 |
| 1263 | TGGGGTCCATTATCAG | NC_045512.2 | 3′→5′ | 28278 | 28293 |
| 1264 | TTGGGGTCCATTATCA | NC_045512.2 | 3′→5′ | 28279 | 28294 |
| 1265 | TTTGGGGTCCATTATC | NC_045512.2 | 3′→5′ | 28280 | 28295 |
| 1266 | TTTTGGGGTCCATTAT | NC_045512.2 | 3′→5′ | 28281 | 28296 |
| 1267 | TGGGTAAACCTTGGGG | NC_045512.2 | 3′→5′ | 28397 | 28412 |
| 1268 | TTGGGTAAACCTTGGG | NC_045512.2 | 3′→5′ | 28398 | 28413 |
| 1269 | ATTGGGTAAACCTTGG | NC_045512.2 | 3′→5′ | 28399 | 28414 |
| 1270 | TATTGGGTAAACCTTG | NC_045512.2 | 3′→5′ | 28400 | 28415 |
| 1271 | TTATTGGGTAAACCTT | NC_045512.2 | 3′→5′ | 28401 | 28416 |
| 1272 | ATTATTGGGTAAACCT | NC_045512.2 | 3′→5′ | 28402 | 28417 |
| 1273 | TATTATTGGGTAAACC | NC_045512.2 | 3′→5′ | 28403 | 28418 |
| 1274 | GTATTATTGGGTAAAC | NC_045512.2 | 3′→5′ | 28404 | 28419 |
| 1275 | AGTATTATTGGGTAAA | NC_045512.2 | 3′→5′ | 28405 | 28420 |
| 1276 | CAGTATTATTGGGTAA | NC_045512.2 | 3′→5′ | 28406 | 28421 |
| 1277 | GCAGTATTATTGGGTA | NC_045512.2 | 3′→5′ | 28407 | 28422 |
| 1278 | CGCAGTATTATTGGGT | NC_045512.2 | 3′→5′ | 28408 | 28423 |
| 1279 | ACGCAGTATTATTGGG | NC_045512.2 | 3′→5′ | 28409 | 28424 |
| 1280 | GACGCAGTATTATTGG | NC_045512.2 | 3′→5′ | 28410 | 28425 |
| 1281 | AGACGCAGTATTATTG | NC_045512.2 | 3′→5′ | 28411 | 28426 |
| 1282 | AAGACGCAGTATTATT | NC_045512.2 | 3′→5′ | 28412 | 28427 |
| 1283 | CAAGACGCAGTATTAT | NC_045512.2 | 3′→5′ | 28413 | 28428 |
| 1284 | CCAAGACGCAGTATTA | NC_045512.2 | 3′→5′ | 28414 | 28429 |
| 1285 | ACCAAGACGCAGTATT | NC_045512.2 | 3′→5′ | 28415 | 28430 |
| 1286 | AACCAAGACGCAGTAT | NC_045512.2 | 3′→5′ | 28416 | 28431 |
| 1287 | GAACCAAGACGCAGTA | NC_045512.2 | 3′→5′ | 28417 | 28432 |
| 1288 | TGAACCAAGACGCAGT | NC_045512.2 | 3′→5′ | 28418 | 28433 |
| 1289 | GTGAACCAAGACGCAG | NC_045512.2 | 3′→5′ | 28419 | 28434 |
| 1290 | GCCAATTTGGTCATCT | NC_045512.2 | 3′→5′ | 28513 | 28528 |
| 1291 | AGCCAATTTGGTCATC | NC_045512.2 | 3′→5′ | 28514 | 28529 |
| 1292 | TAGCCAATTTGGTCAT | NC_045512.2 | 3′→5′ | 28515 | 28530 |
| 1293 | GTAGCCAATTTGGTCA | NC_045512.2 | 3′→5′ | 28516 | 28531 |
| 1294 | AGTAGCCAATTTGGTC | NC_045512.2 | 3′→5′ | 28517 | 28532 |
| 1295 | TAGTAGCCAATTTGGT | NC_045512.2 | 3′→5′ | 28518 | 28533 |
| 1296 | GTAGTAGCCAATTTGG | NC_045512.2 | 3′→5′ | 28519 | 28534 |
| 1297 | GGTAGTAGCCAATTTG | NC_045512.2 | 3′→5′ | 28520 | 28535 |
| 1298 | CGGTAGTAGCCAATTT | NC_045512.2 | 3′→5′ | 28521 | 28536 |
| 1299 | TCGGTAGTAGCCAATT | NC_045512.2 | 3′→5′ | 28522 | 28537 |
| 1300 | TTCGGTAGTAGCCAAT | NC_045512.2 | 3′→5′ | 28523 | 28538 |
| 1301 | CTTCGGTAGTAGCCAA | NC_045512.2 | 3′→5′ | 28524 | 28539 |
| 1302 | TCTTCGGTAGTAGCCA | NC_045512.2 | 3′→5′ | 28525 | 28540 |
| 1303 | CTCTTCGGTAGTAGCC | NC_045512.2 | 3′→5′ | 28526 | 28541 |
| 1304 | GCTCTTCGGTAGTAGC | NC_045512.2 | 3′→5′ | 28527 | 28542 |
| 1305 | AGCTCTTCGGTAGTAG | NC_045512.2 | 3′→5′ | 28528 | 28543 |
| 1306 | TAGCTCTTCGGTAGTA | NC_045512.2 | 3′→5′ | 28529 | 28544 |
| 1307 | GTAGCTCTTCGGTAGT | NC_045512.2 | 3′→5′ | 28530 | 28545 |
| 1308 | GGTAGCTCTTCGGTAG | NC_045512.2 | 3′→5′ | 28531 | 28546 |
| 1309 | CCGTCACCACCACGAA | NC_045512.2 | 3′→5′ | 28554 | 28569 |
| 1310 | AGGCTCCCTCAGTTGC | NC_045512.2 | 3′→5′ | 28673 | 28688 |
| 1311 | AAGGCTCCCTCAGTTG | NC_045512.2 | 3′→5′ | 28674 | 28689 |
| 1312 | CAAGGCTCCCTCAGTT | NC_045512.2 | 3′→5′ | 28675 | 28690 |
| 1313 | TCAAGGCTCCCTCAGT | NC_045512.2 | 3′→5′ | 28676 | 28691 |
| 1314 | TTCAAGGCTCCCTCAG | NC_045512.2 | 3′→5′ | 28677 | 28692 |
| 1315 | TGCGGGTGCCAATGTG | NC_045512.2 | 3′→5′ | 28706 | 28721 |
| 1316 | TTGCGGGTGCCAATGT | NC_045512.2 | 3′→5′ | 28707 | 28722 |
| 1317 | ATTGCGGGTGCCAATG | NC_045512.2 | 3′→5′ | 28708 | 28723 |
| 1318 | GATTGCGGGTGCCAAT | NC_045512.2 | 3′→5′ | 28709 | 28724 |
| 1319 | GGATTGCGGGTGCCAA | NC_045512.2 | 3′→5′ | 28710 | 28725 |
| 1320 | AGGATTGCGGGTGCCA | NC_045512.2 | 3′→5′ | 28711 | 28726 |
| 1321 | AGGAAGTTGTAGCACG | NC_045512.2 | 3′→5′ | 28744 | 28759 |
| 1322 | GAGGAAGTTGTAGCAC | NC_045512.2 | 3′→5′ | 28745 | 28760 |
| 1323 | TGAGGAAGTTGTAGCA | NC_045512.2 | 3′→5′ | 28746 | 28761 |
| 1324 | TTGAGGAAGTTGTAGC | NC_045512.2 | 3′→5′ | 28747 | 28762 |
| 1325 | CTTGAGGAAGTTGTAG | NC_045512.2 | 3′→5′ | 28748 | 28763 |
| 1326 | CCTTGAGGAAGTTGTA | NC_045512.2 | 3′→5′ | 28749 | 28764 |
| 1327 | TCCTTGAGGAAGTTGT | NC_045512.2 | 3′→5′ | 28750 | 28765 |
| 1328 | TTCCTTGAGGAAGTTG | NC_045512.2 | 3′→5′ | 28751 | 28766 |
| 1329 | GTTCCTTGAGGAAGTT | NC_045512.2 | 3′→5′ | 28752 | 28767 |
| 1330 | TGTTCCTTGAGGAAGT | NC_045512.2 | 3′→5′ | 28753 | 28768 |
| 1331 | TTGTTCCTTGAGGAAG | NC_045512.2 | 3′→5′ | 28754 | 28769 |
| 1332 | GTTGTTCCTTGAGGAA | NC_045512.2 | 3′→5′ | 28755 | 28770 |
| 1333 | TGTTGTTCCTTGAGGA | NC_045512.2 | 3′→5′ | 28756 | 28771 |
| 1334 | ATGTTGTTCCTTGAGG | NC_045512.2 | 3′→5′ | 28757 | 28772 |
| 1335 | AATGTTGTTCCTTGAG | NC_045512.2 | 3′→5′ | 28758 | 28773 |
| 1336 | CAATGTTGTTCCTTGA | NC_045512.2 | 3′→5′ | 28759 | 28774 |
| 1337 | GCAATGTTGTTCCTTG | NC_045512.2 | 3′→5′ | 28760 | 28775 |
| 1338 | GGCAATGTTGTTCCTT | NC_045512.2 | 3′→5′ | 28761 | 28776 |
| 1339 | TGGCAATGTTGTTCCT | NC_045512.2 | 3′→5′ | 28762 | 28777 |
| 1340 | TTGGCAATGTTGTTCC | NC_045512.2 | 3′→5′ | 28763 | 28778 |
| 1341 | TTTGGCAATGTTGTTC | NC_045512.2 | 3′→5′ | 28764 | 28779 |
| 1342 | TTTTGGCAATGTTGTT | NC_045512.2 | 3′→5′ | 28765 | 28780 |
| 1343 | CTTTTGGCAATGTTGT | NC_045512.2 | 3′→5′ | 28766 | 28781 |
| 1344 | CCTTTTGGCAATGTTG | NC_045512.2 | 3′→5′ | 28767 | 28782 |
| 1345 | GCCTTTTGGCAATGTT | NC_045512.2 | 3′→5′ | 28768 | 28783 |
| 1346 | AGCCTTTTGGCAATGT | NC_045512.2 | 3′→5′ | 28769 | 28784 |
| 1347 | AAGCCTTTTGGCAATG | NC_045512.2 | 3′→5′ | 28770 | 28785 |
| 1348 | GAAGCCTTTTGGCAAT | NC_045512.2 | 3′→5′ | 28771 | 28786 |
| 1349 | AGAAGCCTTTTGGCAA | NC_045512.2 | 3′→5′ | 28772 | 28787 |
| 1350 | TAGAAGCCTTTTGGCA | NC_045512.2 | 3′→5′ | 28773 | 28788 |
| 1351 | GTAGAAGCCTTTTGGC | NC_045512.2 | 3′→5′ | 28774 | 28789 |
| 1352 | CGTAGAAGCCTTTTGG | NC_045512.2 | 3′→5′ | 28775 | 28790 |
| 1353 | GCGTAGAAGCCTTTTG | NC_045512.2 | 3′→5′ | 28776 | 28791 |
| 1354 | TGCGTAGAAGCCTTTT | NC_045512.2 | 3′→5′ | 28777 | 28792 |
| 1355 | CTGCGTAGAAGCCTTT | NC_045512.2 | 3′→5′ | 28778 | 28793 |
| 1356 | TCTGCGTAGAAGCCTT | NC_045512.2 | 3′→5′ | 28779 | 28794 |
| 1357 | GACTGCCGCCTCTGCT | NC_045512.2 | 3′→5′ | 28799 | 28814 |
| 1358 | TGACTGCCGCCTCTGC | NC_045512.2 | 3′→5′ | 28800 | 28815 |
| 1359 | TTGACTGCCGCCTCTG | NC_045512.2 | 3′→5′ | 28801 | 28816 |
| 1360 | CTTGACTGCCGCCTCT | NC_045512.2 | 3′→5′ | 28802 | 28817 |
| 1361 | GCTTGACTGCCGCCTC | NC_045512.2 | 3′→5′ | 28803 | 28818 |
| 1362 | GGCTTGACTGCCGCCT | NC_045512.2 | 3′→5′ | 28804 | 28819 |
| 1363 | AGGCTTGACTGCCGCC | NC_045512.2 | 3′→5′ | 28805 | 28820 |
| 1364 | GAGGCTTGACTGCCGC | NC_045512.2 | 3′→5′ | 28806 | 28821 |
| 1365 | AGAGGCTTGACTGCCG | NC_045512.2 | 3′→5′ | 28807 | 28822 |
| 1366 | AAGAGGCTTGACTGCC | NC_045512.2 | 3′→5′ | 28808 | 28823 |
| 1367 | GAAGAGGCTTGACTGC | NC_045512.2 | 3′→5′ | 28809 | 28824 |
| 1368 | AGAAGAGGCTTGACTG | NC_045512.2 | 3′→5′ | 28810 | 28825 |
| 1369 | GAGAAGAGGCTTGACT | NC_045512.2 | 3′→5′ | 28811 | 28826 |
| 1370 | CGAGAAGAGGCTTGAC | NC_045512.2 | 3′→5′ | 28812 | 28827 |
| 1371 | AGTTGAATTTCTTGAA | NC_045512.2 | 3′→5′ | 28852 | 28867 |
| 1372 | GAGTTGAATTTCTTGA | NC_045512.2 | 3′→5′ | 28853 | 28868 |
| 1373 | GGAGTTGAATTTCTTG | NC_045512.2 | 3′→5′ | 28854 | 28869 |
| 1374 | TTCCCCTACTGCTGCC | NC_045512.2 | 3′→5′ | 28871 | 28886 |
| 1375 | GCTGGTTCAATCTGTC | NC_045512.2 | 3′→5′ | 28946 | 28961 |
| 1376 | AGCTGGTTCAATCTGT | NC_045512.2 | 3′→5′ | 28947 | 28962 |
| 1377 | AAGCTGGTTCAATCTG | NC_045512.2 | 3′→5′ | 28948 | 28963 |
| 1378 | CAAGCTGGTTCAATCT | NC_045512.2 | 3′→5′ | 28949 | 28964 |
| 1379 | TCAAGCTGGTTCAATC | NC_045512.2 | 3′→5′ | 28950 | 28965 |
| 1380 | CTCAAGCTGGTTCAAT | NC_045512.2 | 3′→5′ | 28951 | 28966 |
| 1381 | TCTCAAGCTGGTTCAA | NC_045512.2 | 3′→5′ | 28952 | 28967 |
| 1382 | CTCTCAAGCTGGTTCA | NC_045512.2 | 3′→5′ | 28953 | 28968 |
| 1383 | GCTCTCAAGCTGGTTC | NC_045512.2 | 3′→5′ | 28954 | 28969 |
| 1384 | TGCTCTCAAGCTGGTT | NC_045512.2 | 3′→5′ | 28955 | 28970 |
| 1385 | TTGCTCTCAAGCTGGT | NC_045512.2 | 3′→5′ | 28956 | 28971 |
| 1386 | TTTGCTCTCAAGCTGG | NC_045512.2 | 3′→5′ | 28957 | 28972 |
| 1387 | GTTGGCCTTTACCAGA | NC_045512.2 | 3′→5′ | 28976 | 28991 |
| 1388 | TGTTGGCCTTTACCAG | NC_045512.2 | 3′→5′ | 28977 | 28992 |
| 1389 | TTGTTGGCCTTTACCA | NC_045512.2 | 3′→5′ | 28978 | 28993 |
| 1390 | GTTGTTGGCCTTTACC | NC_045512.2 | 3′→5′ | 28979 | 28994 |
| 1391 | TGTTGTTGGCCTTTAC | NC_045512.2 | 3′→5′ | 28980 | 28995 |
| 1392 | TTGTTGTTGGCCTTTA | NC_045512.2 | 3′→5′ | 28981 | 28996 |
| 1393 | GTTGTTGTTGGCCTTT | NC_045512.2 | 3′→5′ | 28982 | 28997 |
| 1394 | TGTTGTTGTTGGCCTT | NC_045512.2 | 3′→5′ | 28983 | 28998 |
| 1395 | TTGTTGTTGTTGGCCT | NC_045512.2 | 3′→5′ | 28984 | 28999 |
| 1396 | CTTGTTGTTGTTGGCC | NC_045512.2 | 3′→5′ | 28985 | 29000 |
| 1397 | CCTTGTTGTTGTTGGC | NC_045512.2 | 3′→5′ | 28986 | 29001 |
| 1398 | GCCTTGTTGTTGTTGG | NC_045512.2 | 3′→5′ | 28987 | 29002 |
| 1399 | GGCCTTGTTGTTGTTG | NC_045512.2 | 3′→5′ | 28988 | 29003 |
| 1400 | TGGCCTTGTTGTTGTT | NC_045512.2 | 3′→5′ | 28989 | 29004 |
| 1401 | TTGGCCTTGTTGTTGT | NC_045512.2 | 3′→5′ | 28990 | 29005 |
| 1402 | TTTGGCCTTGTTGTTG | NC_045512.2 | 3′→5′ | 28991 | 29006 |
| 1403 | GTTTGGCCTTGTTGTT | NC_045512.2 | 3′→5′ | 28992 | 29007 |
| 1404 | AGTTTGGCCTTGTTGT | NC_045512.2 | 3′→5′ | 28993 | 29008 |
| 1405 | CAGTTTGGCCTTGTTG | NC_045512.2 | 3′→5′ | 28994 | 29009 |
| 1406 | ACAGTTTGGCCTTGTT | NC_045512.2 | 3′→5′ | 28995 | 29010 |
| 1407 | GACAGTTTGGCCTTGT | NC_045512.2 | 3′→5′ | 28996 | 29011 |
| 1408 | TGACAGTTTGGCCTTG | NC_045512.2 | 3′→5′ | 28997 | 29012 |
| 1409 | GTGACAGTTTGGCCTT | NC_045512.2 | 3′→5′ | 28998 | 29013 |
| 1410 | AGTGACAGTTTGGCCT | NC_045512.2 | 3′→5′ | 28999 | 29014 |
| 1411 | TAGTGACAGTTTGGCC | NC_045512.2 | 3′→5′ | 29000 | 29015 |
| 1412 | TTAGTGACAGTTTGGC | NC_045512.2 | 3′→5′ | 29001 | 29016 |
| 1413 | CTTAGTGACAGTTTGG | NC_045512.2 | 3′→5′ | 29002 | 29017 |
| 1414 | TCTTAGTGACAGTTTG | NC_045512.2 | 3′→5′ | 29003 | 29018 |
| 1415 | TTCTTAGTGACAGTTT | NC_045512.2 | 3′→5′ | 29004 | 29019 |
| 1416 | TTTCTTAGTGACAGTT | NC_045512.2 | 3′→5′ | 29005 | 29020 |
| 1417 | ATTTCTTAGTGACAGT | NC_045512.2 | 3′→5′ | 29006 | 29021 |
| 1418 | GATTTCTTAGTGACAG | NC_045512.2 | 3′→5′ | 29007 | 29022 |
| 1419 | AGATTTCTTAGTGACA | NC_045512.2 | 3′→5′ | 29008 | 29023 |
| 1420 | CAGATTTCTTAGTGAC | NC_045512.2 | 3′→5′ | 29009 | 29024 |
| 1421 | GCAGATTTCTTAGTGA | NC_045512.2 | 3′→5′ | 29010 | 29025 |
| 1422 | AGCAGATTTCTTAGTG | NC_045512.2 | 3′→5′ | 29011 | 29026 |
| 1423 | CAGCAGATTTCTTAGT | NC_045512.2 | 3′→5′ | 29012 | 29027 |
| 1424 | GCAGCAGATTTCTTAG | NC_045512.2 | 3′→5′ | 29013 | 29028 |
| 1425 | AGCAGCAGATTTCTTA | NC_045512.2 | 3′→5′ | 29014 | 29029 |
| 1426 | CAGCAGCAGATTTCTT | NC_045512.2 | 3′→5′ | 29015 | 29030 |
| 1427 | TCAGCAGCAGATTTCT | NC_045512.2 | 3′→5′ | 29016 | 29031 |
| 1428 | CTCAGCAGCAGATTTC | NC_045512.2 | 3′→5′ | 29017 | 29032 |
| 1429 | CCTCAGCAGCAGATTT | NC_045512.2 | 3′→5′ | 29018 | 29033 |
| 1430 | GCCTCAGCAGCAGATT | NC_045512.2 | 3′→5′ | 29019 | 29034 |
| 1431 | TTCCTTGTCTGATTAG | NC_045512.2 | 3′→5′ | 29144 | 29159 |
| 1432 | GTTCCTTGTCTGATTA | NC_045512.2 | 3′→5′ | 29145 | 29160 |
| 1433 | AGTTCCTTGTCTGATT | NC_045512.2 | 3′→5′ | 29146 | 29161 |
| 1434 | CAGTTCCTTGTCTGAT | NC_045512.2 | 3′→5′ | 29147 | 29162 |
| 1435 | TCAGTTCCTTGTCTGA | NC_045512.2 | 3′→5′ | 29148 | 29163 |
| 1436 | ATCAGTTCCTTGTCTG | NC_045512.2 | 3′→5′ | 29149 | 29164 |
| 1437 | AATCAGTTCCTTGTCT | NC_045512.2 | 3′→5′ | 29150 | 29165 |
| 1438 | TAATCAGTTCCTTGTC | NC_045512.2 | 3′→5′ | 29151 | 29166 |
| 1439 | GTAATCAGTTCCTTGT | NC_045512.2 | 3′→5′ | 29152 | 29167 |
| 1440 | TGTAATCAGTTCCTTG | NC_045512.2 | 3′→5′ | 29153 | 29168 |
| 1441 | TTGTAATCAGTTCCTT | NC_045512.2 | 3′→5′ | 29154 | 29169 |
| 1442 | TTTGTAATCAGTTCCT | NC_045512.2 | 3′→5′ | 29155 | 29170 |
| 1443 | GTTTGTAATCAGTTCC | NC_045512.2 | 3′→5′ | 29156 | 29171 |
| 1444 | TGTTTGTAATCAGTTC | NC_045512.2 | 3′→5′ | 29157 | 29172 |
| 1445 | GTGCAATTTGCGGCCA | NC_045512.2 | 3′→5′ | 29174 | 29189 |
| 1446 | TGTGCAATTTGCGGCC | NC_045512.2 | 3′→5′ | 29175 | 29190 |
| 1447 | TTGTGCAATTTGCGGC | NC_045512.2 | 3′→5′ | 29176 | 29191 |
| 1448 | ATTGTGCAATTTGCGG | NC_045512.2 | 3′→5′ | 29177 | 29192 |
| 1449 | AATTGTGCAATTTGCG | NC_045512.2 | 3′→5′ | 29178 | 29193 |
| 1450 | AAATTGTGCAATTTGC | NC_045512.2 | 3′→5′ | 29179 | 29194 |
| 1451 | CAAATTGTGCAATTTG | NC_045512.2 | 3′→5′ | 29180 | 29195 |
| 1452 | GCAAATTGTGCAATTT | NC_045512.2 | 3′→5′ | 29181 | 29196 |
| 1453 | CTTCCATGCCAATGCG | NC_045512.2 | 3′→5′ | 29228 | 29243 |
| 1454 | ACTTCCATGCCAATGC | NC_045512.2 | 3′→5′ | 29229 | 29244 |
| 1455 | GACTTCCATGCCAATG | NC_045512.2 | 3′→5′ | 29230 | 29245 |
| 1456 | TGACTTCCATGCCAAT | NC_045512.2 | 3′→5′ | 29231 | 29246 |
| 1457 | GTGACTTCCATGCCAA | NC_045512.2 | 3′→5′ | 29232 | 29247 |
| 1458 | TGTGACTTCCATGCCA | NC_045512.2 | 3′→5′ | 29233 | 29248 |
| 1459 | GTGTGACTTCCATGCC | NC_045512.2 | 3′→5′ | 29234 | 29249 |
| 1460 | GGTGTGACTTCCATGC | NC_045512.2 | 3′→5′ | 29235 | 29250 |
| 1461 | AGGTGTGACTTCCATG | NC_045512.2 | 3′→5′ | 29236 | 29251 |
| 1462 | AAGGTGTGACTTCCAT | NC_045512.2 | 3′→5′ | 29237 | 29252 |
| 1463 | GAAGGTGTGACTTCCA | NC_045512.2 | 3′→5′ | 29238 | 29253 |
| 1464 | CGAAGGTGTGACTTCC | NC_045512.2 | 3′→5′ | 29239 | 29254 |
| 1465 | CCGAAGGTGTGACTTC | NC_045512.2 | 3′→5′ | 29240 | 29255 |
| 1466 | CCCGAAGGTGTGACTT | NC_045512.2 | 3′→5′ | 29241 | 29256 |
| 1467 | TCCCGAAGGTGTGACT | NC_045512.2 | 3′→5′ | 29242 | 29257 |
| 1468 | TTCCCGAAGGTGTGAC | NC_045512.2 | 3′→5′ | 29243 | 29258 |
| 1469 | GTTCCCGAAGGTGTGA | NC_045512.2 | 3′→5′ | 29244 | 29259 |
| 1470 | CTTTGTCATCCAATTT | NC_045512.2 | 3′→5′ | 29285 | 29300 |
| 1471 | TCTTTGTCATCCAATT | NC_045512.2 | 3′→5′ | 29286 | 29301 |
| 1472 | ATCTTTGTCATCCAAT | NC_045512.2 | 3′→5′ | 29287 | 29302 |
| 1473 | GATCTTTGTCATCCAA | NC_045512.2 | 3′→5′ | 29288 | 29303 |
| 1474 | GGATCTTTGTCATCCA | NC_045512.2 | 3′→5′ | 29289 | 29304 |
| 1475 | TGGATCTTTGTCATCC | NC_045512.2 | 3′→5′ | 29290 | 29305 |
| 1476 | TTTTGTATGCGTCAAT | NC_045512.2 | 3′→5′ | 29342 | 29357 |
| 1477 | GTTTTGTATGCGTCAA | NC_045512.2 | 3′→5′ | 29343 | 29358 |
| 1478 | TGTTTTGTATGCGTCA | NC_045512.2 | 3′→5′ | 29344 | 29359 |
| 1479 | ATGTTTTGTATGCGTC | NC_045512.2 | 3′→5′ | 29345 | 29360 |
| 1480 | AATGTTTTGTATGCGT | NC_045512.2 | 3′→5′ | 29346 | 29361 |
| 1481 | GAATGTTTTGTATGCG | NC_045512.2 | 3′→5′ | 29347 | 29362 |
| 1482 | GGAATGTTTTGTATGC | NC_045512.2 | 3′→5′ | 29348 | 29363 |
| 1483 | GGGAATGTTTTGTATG | NC_045512.2 | 3′→5′ | 29349 | 29364 |
| 1484 | TGGGAATGTTTTGTAT | NC_045512.2 | 3′→5′ | 29350 | 29365 |
| 1485 | GTGGGAATGTTTTGTA | NC_045512.2 | 3′→5′ | 29351 | 29366 |
| 1486 | GGTGGGAATGTTTTGT | NC_045512.2 | 3′→5′ | 29352 | 29367 |
| 1487 | TGGTGGGAATGTTTTG | NC_045512.2 | 3′→5′ | 29353 | 29368 |
| 1488 | TTGGTGGGAATGTTTT | NC_045512.2 | 3′→5′ | 29354 | 29369 |
| 1489 | GTTGGTGGGAATGTTT | NC_045512.2 | 3′→5′ | 29355 | 29370 |
| 1490 | TGTTGGTGGGAATGTT | NC_045512.2 | 3′→5′ | 29356 | 29371 |
| 1491 | CTGTTGGTGGGAATGT | NC_045512.2 | 3′→5′ | 29357 | 29372 |
| 1492 | TCTGTTGGTGGGAATG | NC_045512.2 | 3′→5′ | 29358 | 29373 |
| 1493 | CTCTGTTGGTGGGAAT | NC_045512.2 | 3′→5′ | 29359 | 29374 |
| 1494 | GCTCTGTTGGTGGGAA | NC_045512.2 | 3′→5′ | 29360 | 29375 |
| 1495 | GGCTCTGTTGGTGGGA | NC_045512.2 | 3′→5′ | 29361 | 29376 |
| 1496 | AGGCTCTGTTGGTGGG | NC_045512.2 | 3′→5′ | 29362 | 29377 |
| 1497 | TAGGCTCTGTTGGTGG | NC_045512.2 | 3′→5′ | 29363 | 29378 |
| 1498 | TTAGGCTCTGTTGGTG | NC_045512.2 | 3′→5′ | 29364 | 29379 |
| 1499 | TTTAGGCTCTGTTGGT | NC_045512.2 | 3′→5′ | 29365 | 29380 |
| 1500 | TTTTAGGCTCTGTTGG | NC_045512.2 | 3′→5′ | 29366 | 29381 |
| 1501 | TTTTTAGGCTCTGTTG | NC_045512.2 | 3′→5′ | 29367 | 29382 |
| 1502 | CTTTTTAGGCTCTGTT | NC_045512.2 | 3′→5′ | 29368 | 29383 |
| 1503 | CCTTTTTAGGCTCTGT | NC_045512.2 | 3′→5′ | 29369 | 29384 |
| 1504 | TCCTTTTTAGGCTCTG | NC_045512.2 | 3′→5′ | 29370 | 29385 |
| 1505 | GTCCTTTTTAGGCTCT | NC_045512.2 | 3′→5′ | 29371 | 29386 |
| 1506 | TGTCCTTTTTAGGCTC | NC_045512.2 | 3′→5′ | 29372 | 29387 |
| 1507 | TTGTCCTTTTTAGGCT | NC_045512.2 | 3′→5′ | 29373 | 29388 |
| 1508 | TTTGTCCTTTTTAGGC | NC_045512.2 | 3′→5′ | 29374 | 29389 |
| 1509 | TTTTGTCCTTTTTAGG | NC_045512.2 | 3′→5′ | 29375 | 29390 |
| 1510 | TTTTTGTCCTTTTTAG | NC_045512.2 | 3′→5′ | 29376 | 29391 |
| 1511 | CTTTTTGTCCTTTTTA | NC_045512.2 | 3′→5′ | 29377 | 29392 |
| 1512 | TCTTTTTGTCCTTTTT | NC_045512.2 | 3′→5′ | 29378 | 29393 |
| 1513 | TTCTTTTTGTCCTTTT | NC_045512.2 | 3′→5′ | 29379 | 29394 |
| 1514 | GAAGAAGAGTCACAGT | NC_045512.2 | 3′→5′ | 29444 | 29459 |
| 1515 | GGAAGAAGAGTCACAG | NC_045512.2 | 3′→5′ | 29445 | 29460 |
| 1516 | AGGAAGAAGAGTCACA | NC_045512.2 | 3′→5′ | 29446 | 29461 |
| 1517 | CAGGAAGAAGAGTCAC | NC_045512.2 | 3′→5′ | 29447 | 29462 |
| 1518 | GCAGGAAGAAGAGTCA | NC_045512.2 | 3′→5′ | 29448 | 29463 |
| 1519 | TCTGCCTTGTGTGGTC | NC_045512.2 | 3′→5′ | 29543 | 29558 |
| 1520 | ATCTGCCTTGTGTGGT | NC_045512.2 | 3′→5′ | 29544 | 29559 |
| 1521 | CATCTGCCTTGTGTGG | NC_045512.2 | 3′→5′ | 29545 | 29560 |
| 1522 | CCATCTGCCTTGTGTG | NC_045512.2 | 3′→5′ | 29546 | 29561 |
| 1523 | CCCATCTGCCTTGTGT | NC_045512.2 | 3′→5′ | 29547 | 29562 |
| 1524 | GCCCATCTGCCTTGTG | NC_045512.2 | 3′→5′ | 29548 | 29563 |
| 1525 | AGCCCATCTGCCTTGT | NC_045512.2 | 3′→5′ | 29549 | 29564 |
| 1526 | TAGCCCATCTGCCTTG | NC_045512.2 | 3′→5′ | 29550 | 29565 |
| 1527 | ATAGCCCATCTGCCTT | NC_045512.2 | 3′→5′ | 29551 | 29566 |
| 1528 | CACAAGAGTAGACTAT | NC_045512.2 | 3′→5′ | 29598 | 29613 |
| 1529 | GCACAAGAGTAGACTA | NC_045512.2 | 3′→5′ | 29599 | 29614 |
| 1530 | TGCACAAGAGTAGACT | NC_045512.2 | 3′→5′ | 29600 | 29615 |
| 1531 | CTGCACAAGAGTAGAC | NC_045512.2 | 3′→5′ | 29601 | 29616 |
| 1532 | TCTGCACAAGAGTAGA | NC_045512.2 | 3′→5′ | 29602 | 29617 |
| 1533 | TTCTGCACAAGAGTAG | NC_045512.2 | 3′→5′ | 29603 | 29618 |
| 1534 | ATTCTGCACAAGAGTA | NC_045512.2 | 3′→5′ | 29604 | 29619 |
| 1535 | CATTCTGCACAAGAGT | NC_045512.2 | 3′→5′ | 29605 | 29620 |
| 1536 | TCATTCTGCACAAGAG | NC_045512.2 | 3′→5′ | 29606 | 29621 |
| 1537 | TTCATTCTGCACAAGA | NC_045512.2 | 3′→5′ | 29607 | 29622 |
| 1538 | ATTCATTCTGCACAAG | NC_045512.2 | 3′→5′ | 29608 | 29623 |
| 1539 | AATTCATTCTGCACAA | NC_045512.2 | 3′→5′ | 29609 | 29624 |
| 1540 | GAATTCATTCTGCACA | NC_045512.2 | 3′→5′ | 29610 | 29625 |
| 1541 | AGAATTCATTCTGCAC | NC_045512.2 | 3′→5′ | 29611 | 29626 |
| 1542 | GAGAATTCATTCTGCA | NC_045512.2 | 3′→5′ | 29612 | 29627 |
| 1543 | CGAGAATTCATTCTGC | NC_045512.2 | 3′→5′ | 29613 | 29628 |
| 1544 | ACGAGAATTCATTCTG | NC_045512.2 | 3′→5′ | 29614 | 29629 |
| 1545 | TACGAGAATTCATTCT | NC_045512.2 | 3′→5′ | 29615 | 29630 |
| 1546 | AGATTAAAGTTAACTA | NC_045512.2 | 3′→5′ | 29652 | 29667 |
| 1547 | GAGATTAAAGTTAACT | NC_045512.2 | 3′→5′ | 29653 | 29668 |
| 1548 | TGAGATTAAAGTTAAC | NC_045512.2 | 3′→5′ | 29654 | 29669 |
| 1549 | GTGAGATTAAAGTTAA | NC_045512.2 | 3′→5′ | 29655 | 29670 |
| 1550 | TGTGAGATTAAAGTTA | NC_045512.2 | 3′→5′ | 29656 | 29671 |
| 1551 | ATGTGAGATTAAAGTT | NC_045512.2 | 3′→5′ | 29657 | 29672 |
| 1552 | TATGTGAGATTAAAGT | NC_045512.2 | 3′→5′ | 29658 | 29673 |
| 1553 | CTATGTGAGATTAAAG | NC_045512.2 | 3′→5′ | 29659 | 29674 |
| 1554 | GCTATGTGAGATTAAA | NC_045512.2 | 3′→5′ | 29660 | 29675 |
| 1555 | TGCTATGTGAGATTAA | NC_045512.2 | 3′→5′ | 29661 | 29676 |
| 1556 | TTGCTATGTGAGATTA | NC_045512.2 | 3′→5′ | 29662 | 29677 |
| 1557 | ATTGCTATGTGAGATT | NC_045512.2 | 3′→5′ | 29663 | 29678 |
| 1558 | GATTGCTATGTGAGAT | NC_045512.2 | 3′→5′ | 29664 | 29679 |
| 1559 | AGATTGCTATGTGAGA | NC_045512.2 | 3′→5′ | 29665 | 29680 |
| 1560 | AAGATTGCTATGTGAG | NC_045512.2 | 3′→5′ | 29666 | 29681 |
| 1561 | AAAGATTGCTATGTGA | NC_045512.2 | 3′→5′ | 29667 | 29682 |
| 1562 | TAAAGATTGCTATGTG | NC_045512.2 | 3′→5′ | 29668 | 29683 |
| 1563 | TTAAAGATTGCTATGT | NC_045512.2 | 3′→5′ | 29669 | 29684 |
| 1564 | ATTAAAGATTGCTATG | NC_045512.2 | 3′→5′ | 29670 | 29685 |
| 1565 | GATTAAAGATTGCTAT | NC_045512.2 | 3′→5′ | 29671 | 29686 |
| 1566 | TGATTAAAGATTGCTA | NC_045512.2 | 3′→5′ | 29672 | 29687 |
| 1567 | TCCCTAATGTTACACA | NC_045512.2 | 3′→5′ | 29689 | 29704 |
| 1568 | CTCCCTAATGTTACAC | NC_045512.2 | 3′→5′ | 29690 | 29705 |
| 1569 | CCTCCCTAATGTTACA | NC_045512.2 | 3′→5′ | 29691 | 29706 |
| 1570 | TCCTCCCTAATGTTAC | NC_045512.2 | 3′→5′ | 29692 | 29707 |
| 1571 | GTCCTCCCTAATGTTA | NC_045512.2 | 3′→5′ | 29693 | 29708 |
| 1572 | AGTCCTCCCTAATGTT | NC_045512.2 | 3′→5′ | 29694 | 29709 |
| 1573 | AAGTCCTCCCTAATGT | NC_045512.2 | 3′→5′ | 29695 | 29710 |
| 1574 | CAAGTCCTCCCTAATG | NC_045512.2 | 3′→5′ | 29696 | 29711 |
| 1575 | TCAAGTCCTCCCTAAT | NC_045512.2 | 3′→5′ | 29697 | 29712 |
| 1576 | TTCAAGTCCTCCCTAA | NC_045512.2 | 3′→5′ | 29698 | 29713 |
| 1577 | TTTCAAGTCCTCCCTA | NC_045512.2 | 3′→5′ | 29699 | 29714 |
| 1578 | CTTTCAAGTCCTCCCT | NC_045512.2 | 3′→5′ | 29700 | 29715 |
| 1579 | TCTTTCAAGTCCTCCC | NC_045512.2 | 3′→5′ | 29701 | 29716 |
| 1580 | CTCTTTCAAGTCCTCC | NC_045512.2 | 3′→5′ | 29702 | 29717 |
| 1581 | GCTCTTTCAAGTCCTC | NC_045512.2 | 3′→5′ | 29703 | 29718 |
| 1582 | GGCTCTTTCAAGTCCT | NC_045512.2 | 3′→5′ | 29704 | 29719 |
| 1583 | TGGCTCTTTCAAGTCC | NC_045512.2 | 3′→5′ | 29705 | 29720 |
| 1584 | GTGGCTCTTTCAAGTC | NC_045512.2 | 3′→5′ | 29706 | 29721 |
| 1585 | GGTGGCTCTTTCAAGT | NC_045512.2 | 3′→5′ | 29707 | 29722 |
| 1586 | TGGTGGCTCTTTCAAG | NC_045512.2 | 3′→5′ | 29708 | 29723 |
| 1587 | GTGGTGGCTCTTTCAA | NC_045512.2 | 3′→5′ | 29709 | 29724 |
| 1588 | TGTGGTGGCTCTTTCA | NC_045512.2 | 3′→5′ | 29710 | 29725 |
| 1589 | ATGTGGTGGCTCTTTC | NC_045512.2 | 3′→5′ | 29711 | 29726 |
| 1590 | AATGTGGTGGCTCTTT | NC_045512.2 | 3′→5′ | 29712 | 29727 |
| 1591 | AAATGTGGTGGCTCTT | NC_045512.2 | 3′→5′ | 29713 | 29728 |
| 1592 | AAAATGTGGTGGCTCT | NC_045512.2 | 3′→5′ | 29714 | 29729 |
| 1593 | GAAAATGTGGTGGCTC | NC_045512.2 | 3′→5′ | 29715 | 29730 |
| 1594 | TGAAAATGTGGTGGCT | NC_045512.2 | 3′→5′ | 29716 | 29731 |
| 1595 | ACTCCGCGTGGCCTCG | NC_045512.2 | 3′→5′ | 29733 | 29748 |
| 1596 | TACTCCGCGTGGCCTC | NC_045512.2 | 3′→5′ | 29734 | 29749 |
| 1597 | GTACTCCGCGTGGCCT | NC_045512.2 | 3′→5′ | 29735 | 29750 |
| 1598 | CGTACTCCGCGTGGCC | NC_045512.2 | 3′→5′ | 29736 | 29751 |
| 1599 | TCGTACTCCGCGTGGC | NC_045512.2 | 3′→5′ | 29737 | 29752 |
| 1600 | ATCGTACTCCGCGTGG | NC_045512.2 | 3′→5′ | 29738 | 29753 |
| 1601 | GATCGTACTCCGCGTG | NC_045512.2 | 3′→5′ | 29739 | 29754 |
| 1602 | CGATCGTACTCCGCGT | NC_045512.2 | 3′→5′ | 29740 | 29755 |
| 1603 | TCGATCGTACTCCGCG | NC_045512.2 | 3′→5′ | 29741 | 29756 |
| 1604 | CTCGATCGTACTCCGC | NC_045512.2 | 3′→5′ | 29742 | 29757 |
| 1605 | AGCTCTCCCTAGCATT | NC_045512.2 | 3′→5′ | 29770 | 29785 |
| 1606 | CAGCTCTCCCTAGCAT | NC_045512.2 | 3′→5′ | 29771 | 29786 |
| 1607 | GCAGCTCTCCCTAGCA | NC_045512.2 | 3′→5′ | 29772 | 29787 |
| 1608 | GGCAGCTCTCCCTAGC | NC_045512.2 | 3′→5′ | 29773 | 29788 |
| 1609 | AGGCAGCTCTCCCTAG | NC_045512.2 | 3′→5′ | 29774 | 29789 |
| 1610 | TAGGCAGCTCTCCCTA | NC_045512.2 | 3′→5′ | 29775 | 29790 |
| 1611 | ATAGGCAGCTCTCCCT | NC_045512.2 | 3′→5′ | 29776 | 29791 |
| 1612 | TATAGGCAGCTCTCCC | NC_045512.2 | 3′→5′ | 29777 | 29792 |
| 1613 | ATATAGGCAGCTCTCC | NC_045512.2 | 3′→5′ | 29778 | 29793 |
| 1614 | CATATAGGCAGCTCTC | NC_045512.2 | 3′→5′ | 29779 | 29794 |
| 1615 | CCATATAGGCAGCTCT | NC_045512.2 | 3′→5′ | 29780 | 29795 |
| 1616 | TCCATATAGGCAGCTC | NC_045512.2 | 3′→5′ | 29781 | 29796 |
| 1617 | TTCCATATAGGCAGCT | NC_045512.2 | 3′→5′ | 29782 | 29797 |
| 1618 | CTTCCATATAGGCAGC | NC_045512.2 | 3′→5′ | 29783 | 29798 |
| 1619 | TCTTCCATATAGGCAG | NC_045512.2 | 3′→5′ | 29784 | 29799 |
| 1620 | CTCTTCCATATAGGCA | NC_045512.2 | 3′→5′ | 29785 | 29800 |
| 1621 | GCTCTTCCATATAGGC | NC_045512.2 | 3′→5′ | 29786 | 29801 |
| 1622 | GGCTCTTCCATATAGG | NC_045512.2 | 3′→5′ | 29787 | 29802 |
| 1623 | GGGCTCTTCCATATAG | NC_045512.2 | 3′→5′ | 29788 | 29803 |
| 1624 | AGGGCTCTTCCATATA | NC_045512.2 | 3′→5′ | 29789 | 29804 |
| 1625 | TAGGGCTCTTCCATAT | NC_045512.2 | 3′→5′ | 29790 | 29805 |
| 1626 | TTAGGGCTCTTCCATA | NC_045512.2 | 3′→5′ | 29791 | 29806 |
| 1627 | ATTAGGGCTCTTCCAT | NC_045512.2 | 3′→5′ | 29792 | 29807 |
| 1628 | CATTAGGGCTCTTCCA | NC_045512.2 | 3′→5′ | 29793 | 29808 |
| 1629 | ACATTAGGGCTCTTCC | NC_045512.2 | 3′→5′ | 29794 | 29809 |
| 1630 | CACATTAGGGCTCTTC | NC_045512.2 | 3′→5′ | 29795 | 29810 |
| 1631 | ACACATTAGGGCTCTT | NC_045512.2 | 3′→5′ | 29796 | 29811 |
| 1632 | TACACATTAGGGCTCT | NC_045512.2 | 3′→5′ | 29797 | 29812 |
| 1633 | TTACACATTAGGGCTC | NC_045512.2 | 3′→5′ | 29798 | 29813 |
| 1634 | TTTACACATTAGGGCT | NC_045512.2 | 3′→5′ | 29799 | 29814 |
| 1635 | TTTTACACATTAGGGC | NC_045512.2 | 3′→5′ | 29800 | 29815 |
| 1636 | ATTTTACACATTAGGG | NC_045512.2 | 3′→5′ | 29801 | 29816 |
| 1637 | AATTTTACACATTAGG | NC_045512.2 | 3′→5′ | 29802 | 29817 |
| 1638 | TAATTTTACACATTAG | NC_045512.2 | 3′→5′ | 29803 | 29818 |
| 1639 | TTAATTTTACACATTA | NC_045512.2 | 3′→5′ | 29804 | 29819 |
| 1640 | ATTAATTTTACACATT | NC_045512.2 | 3′→5′ | 29805 | 29820 |
| 1641 | AATTAATTTTACACAT | NC_045512.2 | 3′→5′ | 29806 | 29821 |
| 1642 | AAATTAATTTTACACA | NC_045512.2 | 3′→5′ | 29807 | 29822 |
| 1643 | AAAATTAATTTTACAC | NC_045512.2 | 3′→5′ | 29808 | 29823 |
| 1644 | TAAAATTAATTTTACA | NC_045512.2 | 3′→5′ | 29809 | 29824 |
| 1645 | CTAAAATTAATTTTAC | NC_045512.2 | 3′→5′ | 29810 | 29825 |
| 1646 | ACTAAAATTAATTTTA | NC_045512.2 | 3′→5′ | 29811 | 29826 |
| 1647 | TACTAAAATTAATTTT | NC_045512.2 | 3′→5′ | 29812 | 29827 |
| 1648 | CTACTAAAATTAATTT | NC_045512.2 | 3′→5′ | 29813 | 29828 |
| 1649 | TGTCAACGACAGTAATT | NC_045512.2 | 3′→5′ | 142 | 158 |
| 1650 | GACGAAACCGTAAGCAG | NC_045512.2 | 3′→5′ | 190 | 206 |
| 1651 | GGACGAAACCGTAAGCA | NC_045512.2 | 3′→5′ | 191 | 207 |
| 1652 | CGGACGAAACCGTAAGC | NC_045512.2 | 3′→5′ | 192 | 208 |
| 1653 | ACGGACGAAACCGTAAG | NC_045512.2 | 3′→5′ | 193 | 209 |
| 1654 | CACGGACGAAACCGTAA | NC_045512.2 | 3′→5′ | 194 | 210 |
| 1655 | ACACGGACGAAACCGTA | NC_045512.2 | 3′→5′ | 195 | 211 |
| 1656 | AACACGGACGAAACCGT | NC_045512.2 | 3′→5′ | 196 | 212 |
| 1657 | CAACACGGACGAAACCG | NC_045512.2 | 3′→5′ | 197 | 213 |
| 1658 | GCAACACGGACGAAACC | NC_045512.2 | 3′→5′ | 198 | 214 |
| 1659 | TGCAACACGGACGAAAC | NC_045512.2 | 3′→5′ | 199 | 215 |
| 1660 | CTGCAACACGGACGAAA | NC_045512.2 | 3′→5′ | 200 | 216 |
| 1661 | ACCCGGACGAAACCTAG | NC_045512.2 | 3′→5′ | 233 | 249 |
| 1662 | CACCCGGACGAAACCTA | NC_045512.2 | 3′→5′ | 234 | 250 |
| 1663 | ACACCCGGACGAAACCT | NC_045512.2 | 3′→5′ | 235 | 251 |
| 1664 | CACACCCGGACGAAACC | NC_045512.2 | 3′→5′ | 236 | 252 |
| 1665 | TCACACCCGGACGAAAC | NC_045512.2 | 3′→5′ | 237 | 253 |
| 1666 | GTCACACCCGGACGAAA | NC_045512.2 | 3′→5′ | 238 | 254 |
| 1667 | GGTCACACCCGGACGAA | NC_045512.2 | 3′→5′ | 239 | 255 |
| 1668 | CGGTCACACCCGGACGA | NC_045512.2 | 3′→5′ | 240 | 256 |
| 1669 | TCGGTCACACCCGGACG | NC_045512.2 | 3′→5′ | 241 | 257 |
| 1670 | TTCGGTCACACCCGGAC | NC_045512.2 | 3′→5′ | 242 | 258 |
| 1671 | TTTCGGTCACACCCGGA | NC_045512.2 | 3′→5′ | 243 | 259 |
| 1672 | CTTTCGGTCACACCCGG | NC_045512.2 | 3′→5′ | 244 | 260 |
| 1673 | CCTTTCGGTCACACCCG | NC_045512.2 | 3′→5′ | 245 | 261 |
| 1674 | ACCTTTCGGTCACACCC | NC_045512.2 | 3′→5′ | 246 | 262 |
| 1675 | TACCTTTCGGTCACACC | NC_045512.2 | 3′→5′ | 247 | 263 |
| 1676 | TTACCTTTCGGTCACAC | NC_045512.2 | 3′→5′ | 248 | 264 |
| 1677 | CTTACCTTTCGGTCACA | NC_045512.2 | 3′→5′ | 249 | 265 |
| 1678 | TCTTACCTTTCGGTCAC | NC_045512.2 | 3′→5′ | 250 | 266 |
| 1679 | ATCTTACCTTTCGGTCA | NC_045512.2 | 3′→5′ | 251 | 267 |
| 1680 | CATCTTACCTTTCGGTC | NC_045512.2 | 3′→5′ | 252 | 268 |
| 1681 | CCATCTTACCTTTCGGT | NC_045512.2 | 3′→5′ | 253 | 269 |
| 1682 | TCCATCTTACCTTTCGG | NC_045512.2 | 3′→5′ | 254 | 270 |
| 1683 | CTCCATCTTACCTTTCG | NC_045512.2 | 3′→5′ | 255 | 271 |
| 1684 | TCTCCATCTTACCTTTC | NC_045512.2 | 3′→5′ | 256 | 272 |
| 1685 | CTCTCCATCTTACCTTT | NC_045512.2 | 3′→5′ | 257 | 273 |
| 1686 | GCTCTCCATCTTACCTT | NC_045512.2 | 3′→5′ | 258 | 274 |
| 1687 | GGCTCTCCATCTTACCT | NC_045512.2 | 3′→5′ | 259 | 275 |
| 1688 | AGGCTCTCCATCTTACC | NC_045512.2 | 3′→5′ | 260 | 276 |
| 1689 | AAGGCTCTCCATCTTAC | NC_045512.2 | 3′→5′ | 261 | 277 |
| 1690 | CAAGGCTCTCCATCTTA | NC_045512.2 | 3′→5′ | 262 | 278 |
| 1691 | ACAAGGCTCTCCATCTT | NC_045512.2 | 3′→5′ | 263 | 279 |
| 1692 | GTGTGTTTTCTCGTTGA | NC_045512.2 | 3′→5′ | 288 | 304 |
| 1693 | CGTGTGTTTTCTCGTTG | NC_045512.2 | 3′→5′ | 289 | 305 |
| 1694 | ACGTGTGTTTTCTCGTT | NC_045512.2 | 3′→5′ | 290 | 306 |
| 1695 | GACGTGTGTTTTCTCGT | NC_045512.2 | 3′→5′ | 291 | 307 |
| 1696 | GGACGTGTGTTTTCTCG | NC_045512.2 | 3′→5′ | 292 | 308 |
| 1697 | TGGACGTGTGTTTTCTC | NC_045512.2 | 3′→5′ | 293 | 309 |
| 1698 | TTGGACGTGTGTTTTCT | NC_045512.2 | 3′→5′ | 294 | 310 |
| 1699 | GTTGGACGTGTGTTTTC | NC_045512.2 | 3′→5′ | 295 | 311 |
| 1700 | AGTTGGACGTGTGTTTT | NC_045512.2 | 3′→5′ | 296 | 312 |
| 1701 | GAGTTGGACGTGTGTTT | NC_045512.2 | 3′→5′ | 297 | 313 |
| 1702 | TGAGTTGGACGTGTGTT | NC_045512.2 | 3′→5′ | 298 | 314 |
| 1703 | CTGAGTTGGACGTGTGT | NC_045512.2 | 3′→5′ | 299 | 315 |
| 1704 | ACTGAGTTGGACGTGTG | NC_045512.2 | 3′→5′ | 300 | 316 |
| 1705 | AACTGAGTTGGACGTGT | NC_045512.2 | 3′→5′ | 301 | 317 |
| 1706 | AAACTGAGTTGGACGTG | NC_045512.2 | 3′→5′ | 302 | 318 |
| 1707 | CAAACTGAGTTGGACGT | NC_045512.2 | 3′→5′ | 303 | 319 |
| 1708 | GCAAACTGAGTTGGACG | NC_045512.2 | 3′→5′ | 304 | 320 |
| 1709 | GGCAAACTGAGTTGGAC | NC_045512.2 | 3′→5′ | 305 | 321 |
| 1710 | AGGCAAACTGAGTTGGA | NC_045512.2 | 3′→5′ | 306 | 322 |
| 1711 | CAGGCAAACTGAGTTGG | NC_045512.2 | 3′→5′ | 307 | 323 |
| 1712 | ACAGGCAAACTGAGTTG | NC_045512.2 | 3′→5′ | 308 | 324 |
| 1713 | ACATAGGGCTGTTCAAG | NC_045512.2 | 3′→5′ | 455 | 471 |
| 1714 | CACATAGGGCTGTTCAA | NC_045512.2 | 3′→5′ | 456 | 472 |
| 1715 | ACACATAGGGCTGTTCA | NC_045512.2 | 3′→5′ | 457 | 473 |
| 1716 | AACACATAGGGCTGTTC | NC_045512.2 | 3′→5′ | 458 | 474 |
| 1717 | GAACACATAGGGCTGTT | NC_045512.2 | 3′→5′ | 459 | 475 |
| 1718 | TGAACACATAGGGCTGT | NC_045512.2 | 3′→5′ | 460 | 476 |
| 1719 | ATGAACACATAGGGCTG | NC_045512.2 | 3′→5′ | 461 | 477 |
| 1720 | TTCTTACGAAGAAGAAC | NC_045512.2 | 3′→5′ | 626 | 642 |
| 1721 | GTTCTTACGAAGAAGAA | NC_045512.2 | 3′→5′ | 627 | 643 |
| 1722 | CGTTCTTACGAAGAAGA | NC_045512.2 | 3′→5′ | 628 | 644 |
| 1723 | CCGTTCTTACGAAGAAG | NC_045512.2 | 3′→5′ | 629 | 645 |
| 1724 | ACCGTTCTTACGAAGAA | NC_045512.2 | 3′→5′ | 630 | 646 |
| 1725 | TACCGTTCTTACGAAGA | NC_045512.2 | 3′→5′ | 631 | 647 |
| 1726 | TTACCGTTCTTACGAAG | NC_045512.2 | 3′→5′ | 632 | 648 |
| 1727 | ATTACCGTTCTTACGAA | NC_045512.2 | 3′→5′ | 633 | 649 |
| 1728 | TATTACCGTTCTTACGA | NC_045512.2 | 3′→5′ | 634 | 650 |
| 1729 | TTATTACCGTTCTTACG | NC_045512.2 | 3′→5′ | 635 | 651 |
| 1730 | TCAGTGCCAAGCTCGTC | NC_045512.2 | 3′→5′ | 704 | 720 |
| 1731 | ATCAGTGCCAAGCTCGT | NC_045512.2 | 3′→5′ | 705 | 721 |
| 1732 | GATCAGTGCCAAGCTCG | NC_045512.2 | 3′→5′ | 706 | 722 |
| 1733 | GGATCAGTGCCAAGCTC | NC_045512.2 | 3′→5′ | 707 | 723 |
| 1734 | AACACACAGCCTCCAAA | NC_045512.2 | 3′→5′ | 1481 | 1497 |
| 1735 | TAAGTTTTAAATAACCA | NC_045512.2 | 3′→5′ | 3352 | 3368 |
| 1736 | GTAAGTTTTAAATAACC | NC_045512.2 | 3′→5′ | 3353 | 3369 |
| 1737 | AGTAAGTTTTAAATAAC | NC_045512.2 | 3′→5′ | 3354 | 3370 |
| 1738 | CAGTAAGTTTTAAATAA | NC_045512.2 | 3′→5′ | 3355 | 3371 |
| 1739 | TCAGTAAGTTTTAAATA | NC_045512.2 | 3′→5′ | 3356 | 3372 |
| 1740 | GTCAGTAAGTTTTAAAT | NC_045512.2 | 3′→5′ | 3357 | 3373 |
| 1741 | TGTCAGTAAGTTTTAAA | NC_045512.2 | 3′→5′ | 3358 | 3374 |
| 1742 | TTGTCAGTAAGTTTTAA | NC_045512.2 | 3′→5′ | 3359 | 3375 |
| 1743 | ATTGTCAGTAAGTTTTA | NC_045512.2 | 3′→5′ | 3360 | 3376 |
| 1744 | CATTGTCAGTAAGTTTT | NC_045512.2 | 3′→5′ | 3361 | 3377 |
| 1745 | ACATTGTCAGTAAGTTT | NC_045512.2 | 3′→5′ | 3362 | 3378 |
| 1746 | AACTTAGTTTCTTCCAG | NC_045512.2 | 3′→5′ | 3992 | 4008 |
| 1747 | GCACAAAAGTTAGCAGC | NC_045512.2 | 3′→5′ | 5384 | 5400 |
| 1748 | TGCACAAAAGTTAGCAG | NC_045512.2 | 3′→5′ | 5385 | 5401 |
| 1749 | GTGCACAAAAGTTAGCA | NC_045512.2 | 3′→5′ | 5386 | 5402 |
| 1750 | AGTGCACAAAAGTTAGC | NC_045512.2 | 3′→5′ | 5387 | 5403 |
| 1751 | CCACTACTTCTTCAGAG | NC_045512.2 | 3′→5′ | 6406 | 6422 |
| 1752 | TCCACTACTTCTTCAGA | NC_045512.2 | 3′→5′ | 6407 | 6423 |
| 1753 | TTCCACTACTTCTTCAG | NC_045512.2 | 3′→5′ | 6408 | 6424 |
| 1754 | TTTCCACTACTTCTTCA | NC_045512.2 | 3′→5′ | 6409 | 6425 |
| 1755 | TTTTCCACTACTTCTTC | NC_045512.2 | 3′→5′ | 6410 | 6426 |
| 1756 | ATTTTCCACTACTTCTT | NC_045512.2 | 3′→5′ | 6411 | 6427 |
| 1757 | GATTTTCCACTACTTCT | NC_045512.2 | 3′→5′ | 6412 | 6428 |
| 1758 | GGATTTTCCACTACTTC | NC_045512.2 | 3′→5′ | 6413 | 6429 |
| 1759 | AGGATTTTCCACTACTT | NC_045512.2 | 3′→5′ | 6414 | 6430 |
| 1760 | TAGGATTTTCCACTACT | NC_045512.2 | 3′→5′ | 6415 | 6431 |
| 1761 | GTAGGATTTTCCACTAC | NC_045512.2 | 3′→5′ | 6416 | 6432 |
| 1762 | GGTAGGATTTTCCACTA | NC_045512.2 | 3′→5′ | 6417 | 6433 |
| 1763 | ACTTCGGTAGTTTTCAC | NC_045512.2 | 3′→5′ | 6461 | 6477 |
| 1764 | AACTTCGGTAGTTTTCA | NC_045512.2 | 3′→5′ | 6462 | 6478 |
| 1765 | CAACTTCGGTAGTTTTC | NC_045512.2 | 3′→5′ | 6463 | 6479 |
| 1766 | ACAACTTCGGTAGTTTT | NC_045512.2 | 3′→5′ | 6464 | 6480 |
| 1767 | TACAACTTCGGTAGTTT | NC_045512.2 | 3′→5′ | 6465 | 6481 |
| 1768 | CTACAACTTCGGTAGTT | NC_045512.2 | 3′→5′ | 6466 | 6482 |
| 1769 | CCTACAACTTCGGTAGT | NC_045512.2 | 3′→5′ | 6467 | 6483 |
| 1770 | TCATTAGGTTTCTTAAT | NC_045512.2 | 3′→5′ | 6584 | 6600 |
| 1771 | TTAACAATAGTTGTACA | NC_045512.2 | 3′→5′ | 7532 | 7548 |
| 1772 | ATTAACAATAGTTGTAC | NC_045512.2 | 3′→5′ | 7533 | 7549 |
| 1773 | CATTAACAATAGTTGTA | NC_045512.2 | 3′→5′ | 7534 | 7550 |
| 1774 | CCATTAACAATAGTTGT | NC_045512.2 | 3′→5′ | 7535 | 7551 |
| 1775 | ATTGGTCTTTTAAACTG | NC_045512.2 | 3′→5′ | 7691 | 7707 |
| 1776 | TTGTGACTTTTTGCTAC | NC_045512.2 | 3′→5′ | 8372 | 8388 |
| 1777 | TGTCACGAGTGACACCA | NC_045512.2 | 3′→5′ | 8707 | 8723 |
| 1778 | ATGTCACGAGTGACACC | NC_045512.2 | 3′→5′ | 8708 | 8724 |
| 1779 | TGTCAAGTACAAGTAAA | NC_045512.2 | 3′→5′ | 9588 | 9604 |
| 1780 | ATGTCAAGTACAAGTAA | NC_045512.2 | 3′→5′ | 9589 | 9605 |
| 1781 | AATGTCAAGTACAAGTA | NC_045512.2 | 3′→5′ | 9590 | 9606 |
| 1782 | ACATGTCTTGGACAGTA | NC_045512.2 | 3′→5′ | 10163 | 10179 |
| 1783 | GATGGTGAACCATTGTA | NC_045512.2 | 3′→5′ | 10406 | 10422 |
| 1784 | CCAACACTACCACATGA | NC_045512.2 | 3′→5′ | 10484 | 10500 |
| 1785 | ACCAACACTACCACATG | NC_045512.2 | 3′→5′ | 10485 | 10501 |
| 1786 | AACCAACACTACCACAT | NC_045512.2 | 3′→5′ | 10486 | 10502 |
| 1787 | AAACCAACACTACCACA | NC_045512.2 | 3′→5′ | 10487 | 10503 |
| 1788 | AAAACCAACACTACCAC | NC_045512.2 | 3′→5′ | 10488 | 10504 |
| 1789 | TAAAACCAACACTACCA | NC_045512.2 | 3′→5′ | 10489 | 10505 |
| 1790 | TTAAAACCAACACTACC | NC_045512.2 | 3′→5′ | 10490 | 10506 |
| 1791 | GTTAAAACCAACACTAC | NC_045512.2 | 3′→5′ | 10491 | 10507 |
| 1792 | TGTTAAAACCAACACTA | NC_045512.2 | 3′→5′ | 10492 | 10508 |
| 1793 | ATGTTAAAACCAACACT | NC_045512.2 | 3′→5′ | 10493 | 10509 |
| 1794 | CCTAAGAAACAATAAAC | NC_045512.2 | 3′→5′ | 11609 | 11625 |
| 1795 | GCCTAAGAAACAATAAA | NC_045512.2 | 3′→5′ | 11610 | 11626 |
| 1796 | AGCCTAAGAAACAATAA | NC_045512.2 | 3′→5′ | 11611 | 11627 |
| 1797 | TAGCCTAAGAAACAATA | NC_045512.2 | 3′→5′ | 11612 | 11628 |
| 1798 | ATAGCCTAAGAAACAAT | NC_045512.2 | 3′→5′ | 11613 | 11629 |
| 1799 | AATAGCCTAAGAAACAA | NC_045512.2 | 3′→5′ | 11614 | 11630 |
| 1800 | TCATAAACACCAAGAGT | NC_045512.2 | 3′→5′ | 11684 | 11700 |
| 1801 | ATTTTAGACTGTACAGT | NC_045512.2 | 3′→5′ | 11834 | 11850 |
| 1802 | CATTTTAGACTGTACAG | NC_045512.2 | 3′→5′ | 11835 | 11851 |
| 1803 | ACATTTTAGACTGTACA | NC_045512.2 | 3′→5′ | 11836 | 11852 |
| 1804 | GACATTTTAGACTGTAC | NC_045512.2 | 3′→5′ | 11837 | 11853 |
| 1805 | ACAGCACCCTGCATGGA | NC_045512.2 | 3′→5′ | 12023 | 12039 |
| 1806 | TACAGCACCCTGCATGG | NC_045512.2 | 3′→5′ | 12024 | 12040 |
| 1807 | CTACAGCACCCTGCATG | NC_045512.2 | 3′→5′ | 12025 | 12041 |
| 1808 | TCTACAGCACCCTGCAT | NC_045512.2 | 3′→5′ | 12026 | 12042 |
| 1809 | GTCTACAGCACCCTGCA | NC_045512.2 | 3′→5′ | 12027 | 12043 |
| 1810 | TGTCTACAGCACCCTGC | NC_045512.2 | 3′→5′ | 12028 | 12044 |
| 1811 | ATGTCTACAGCACCCTG | NC_045512.2 | 3′→5′ | 12029 | 12045 |
| 1812 | ACTTCAGAATCACCATT | NC_045512.2 | 3′→5′ | 12173 | 12189 |
| 1813 | TTAGCCACATTCAAAGA | NC_045512.2 | 3′→5′ | 12212 | 12228 |
| 1814 | TTTAGCCACATTCAAAG | NC_045512.2 | 3′→5′ | 12213 | 12229 |
| 1815 | ATTTAGCCACATTCAAA | NC_045512.2 | 3′→5′ | 12214 | 12230 |
| 1816 | GATTTAGCCACATTCAA | NC_045512.2 | 3′→5′ | 12215 | 12231 |
| 1817 | AGATTTAGCCACATTCA | NC_045512.2 | 3′→5′ | 12216 | 12232 |
| 1818 | CAGATTTAGCCACATTC | NC_045512.2 | 3′→5′ | 12217 | 12233 |
| 1819 | TCAGATTTAGCCACATT | NC_045512.2 | 3′→5′ | 12218 | 12234 |
| 1820 | GCCATCTTTTCCAACTT | NC_045512.2 | 3′→5′ | 12263 | 12279 |
| 1821 | TACATTTGGGTCATAGC | NC_045512.2 | 3′→5′ | 12287 | 12303 |
| 1822 | ACTTTTGCCCTCTTGTC | NC_045512.2 | 3′→5′ | 12323 | 12339 |
| 1823 | TTGTTGATAATGTTGTT | NC_045512.2 | 3′→5′ | 12401 | 12417 |
| 1824 | ATTGTTGATAATGTTGT | NC_045512.2 | 3′→5′ | 12402 | 12418 |
| 1825 | CATTGTTGATAATGTTG | NC_045512.2 | 3′→5′ | 12403 | 12419 |
| 1826 | GCATTGTTGATAATGTT | NC_045512.2 | 3′→5′ | 12404 | 12420 |
| 1827 | GACATCTGTCGTAGTGC | NC_045512.2 | 3′→5′ | 12707 | 12723 |
| 1828 | ACAAACCTACCTCCCTT | NC_045512.2 | 3′→5′ | 12791 | 12807 |
| 1829 | GGGAATCTAGCCCATTT | NC_045512.2 | 3′→5′ | 12839 | 12855 |
| 1830 | AGGGAATCTAGCCCATT | NC_045512.2 | 3′→5′ | 12840 | 12856 |
| 1831 | TAGGGAATCTAGCCCAT | NC_045512.2 | 3′→5′ | 12841 | 12857 |
| 1832 | TTAGGGAATCTAGCCCA | NC_045512.2 | 3′→5′ | 12842 | 12858 |
| 1833 | CTTAGGGAATCTAGCCC | NC_045512.2 | 3′→5′ | 12843 | 12859 |
| 1834 | TCTTAGGGAATCTAGCC | NC_045512.2 | 3′→5′ | 12844 | 12860 |
| 1835 | CTCTTAGGGAATCTAGC | NC_045512.2 | 3′→5′ | 12845 | 12861 |
| 1836 | ACTCTTAGGGAATCTAG | NC_045512.2 | 3′→5′ | 12846 | 12862 |
| 1837 | CACTCTTAGGGAATCTA | NC_045512.2 | 3′→5′ | 12847 | 12863 |
| 1838 | TCACTCTTAGGGAATCT | NC_045512.2 | 3′→5′ | 12848 | 12864 |
| 1839 | ATCACTCTTAGGGAATC | NC_045512.2 | 3′→5′ | 12849 | 12865 |
| 1840 | CATCACTCTTAGGGAAT | NC_045512.2 | 3′→5′ | 12850 | 12866 |
| 1841 | CCATCACTCTTAGGGAA | NC_045512.2 | 3′→5′ | 12851 | 12867 |
| 1842 | AGGTGGTTCCAGTTCTG | NC_045512.2 | 3′→5′ | 12885 | 12901 |
| 1843 | AAGGTGGTTCCAGTTCT | NC_045512.2 | 3′→5′ | 12886 | 12902 |
| 1844 | CAAGGTGGTTCCAGTTC | NC_045512.2 | 3′→5′ | 12887 | 12903 |
| 1845 | ACAAGGTGGTTCCAGTT | NC_045512.2 | 3′→5′ | 12888 | 12904 |
| 1846 | TACAAGGTGGTTCCAGT | NC_045512.2 | 3′→5′ | 12889 | 12905 |
| 1847 | CTACAAGGTGGTTCCAG | NC_045512.2 | 3′→5′ | 12890 | 12906 |
| 1848 | CCTACAAGGTGGTTCCA | NC_045512.2 | 3′→5′ | 12891 | 12907 |
| 1849 | ACCTACAAGGTGGTTCC | NC_045512.2 | 3′→5′ | 12892 | 12908 |
| 1850 | AACCTACAAGGTGGTTC | NC_045512.2 | 3′→5′ | 12893 | 12909 |
| 1851 | AAACCTACAAGGTGGTT | NC_045512.2 | 3′→5′ | 12894 | 12910 |
| 1852 | CAAACCTACAAGGTGGT | NC_045512.2 | 3′→5′ | 12895 | 12911 |
| 1853 | ACAAACCTACAAGGTGG | NC_045512.2 | 3′→5′ | 12896 | 12912 |
| 1854 | AACAAACCTACAAGGTG | NC_045512.2 | 3′→5′ | 12897 | 12913 |
| 1855 | TAACAAACCTACAAGGT | NC_045512.2 | 3′→5′ | 12898 | 12914 |
| 1856 | GTAACAAACCTACAAGG | NC_045512.2 | 3′→5′ | 12899 | 12915 |
| 1857 | TGTAACAAACCTACAAG | NC_045512.2 | 3′→5′ | 12900 | 12916 |
| 1858 | CTGTAACAAACCTACAA | NC_045512.2 | 3′→5′ | 12901 | 12917 |
| 1859 | TCTGTAACAAACCTACA | NC_045512.2 | 3′→5′ | 12902 | 12918 |
| 1860 | GTCTGTAACAAACCTAC | NC_045512.2 | 3′→5′ | 12903 | 12919 |
| 1861 | TGTCTGTAACAAACCTA | NC_045512.2 | 3′→5′ | 12904 | 12920 |
| 1862 | GTGTCTGTAACAAACCT | NC_045512.2 | 3′→5′ | 12905 | 12921 |
| 1863 | TGTGTCTGTAACAAACC | NC_045512.2 | 3′→5′ | 12906 | 12922 |
| 1864 | GTGTGTCTGTAACAAAC | NC_045512.2 | 3′→5′ | 12907 | 12923 |
| 1865 | GGTGTGTCTGTAACAAA | NC_045512.2 | 3′→5′ | 12908 | 12924 |
| 1866 | TCTATTTAGGTTGTTTA | NC_045512.2 | 3′→5′ | 12966 | 12982 |
| 1867 | CTCTATTTAGGTTGTTT | NC_045512.2 | 3′→5′ | 12967 | 12983 |
| 1868 | CCTCTATTTAGGTTGTT | NC_045512.2 | 3′→5′ | 12968 | 12984 |
| 1869 | ACCTCTATTTAGGTTGT | NC_045512.2 | 3′→5′ | 12969 | 12985 |
| 1870 | TACCTCTATTTAGGTTG | NC_045512.2 | 3′→5′ | 12970 | 12986 |
| 1871 | ATACCTCTATTTAGGTT | NC_045512.2 | 3′→5′ | 12971 | 12987 |
| 1872 | CATACCTCTATTTAGGT | NC_045512.2 | 3′→5′ | 12972 | 12988 |
| 1873 | CCATACCTCTATTTAGG | NC_045512.2 | 3′→5′ | 12973 | 12989 |
| 1874 | ACCATACCTCTATTTAG | NC_045512.2 | 3′→5′ | 12974 | 12990 |
| 1875 | ACAGTTGAATTGGCAGG | NC_045512.2 | 3′→5′ | 13046 | 13062 |
| 1876 | TGTGTACACAACATCTT | NC_045512.2 | 3′→5′ | 13151 | 13167 |
| 1877 | GTGTGTACACAACATCT | NC_045512.2 | 3′→5′ | 13152 | 13168 |
| 1878 | TGTGTGTACACAACATC | NC_045512.2 | 3′→5′ | 13153 | 13169 |
| 1879 | GTGTGTGTACACAACAT | NC_045512.2 | 3′→5′ | 13154 | 13170 |
| 1880 | AGTGTGTGTACACAACA | NC_045512.2 | 3′→5′ | 13155 | 13171 |
| 1881 | CAGTGTGTGTACACAAC | NC_045512.2 | 3′→5′ | 13156 | 13172 |
| 1882 | CCAGTGTGTGTACACAA | NC_045512.2 | 3′→5′ | 13157 | 13173 |
| 1883 | ACCAGTGTGTGTACACA | NC_045512.2 | 3′→5′ | 13158 | 13174 |
| 1884 | TACCAGTGTGTGTACAC | NC_045512.2 | 3′→5′ | 13159 | 13175 |
| 1885 | GTACCAGTGTGTGTACA | NC_045512.2 | 3′→5′ | 13160 | 13176 |
| 1886 | GGGTCATTAGCACAAGT | NC_045512.2 | 3′→5′ | 13328 | 13344 |
| 1887 | CGGTACAGACTGTGTTT | NC_045512.2 | 3′→5′ | 13363 | 13379 |
| 1888 | ACGGTACAGACTGTGTT | NC_045512.2 | 3′→5′ | 13364 | 13380 |
| 1889 | GACGGTACAGACTGTGT | NC_045512.2 | 3′→5′ | 13365 | 13381 |
| 1890 | AGACGGTACAGACTGTG | NC_045512.2 | 3′→5′ | 13366 | 13382 |
| 1891 | CAGACGGTACAGACTGT | NC_045512.2 | 3′→5′ | 13367 | 13383 |
| 1892 | GCAGACGGTACAGACTG | NC_045512.2 | 3′→5′ | 13368 | 13384 |
| 1893 | CGCAGACGGTACAGACT | NC_045512.2 | 3′→5′ | 13369 | 13385 |
| 1894 | CCGCAGACGGTACAGAC | NC_045512.2 | 3′→5′ | 13370 | 13386 |
| 1895 | CCATAACCTTTCCACAT | NC_045512.2 | 3′→5′ | 13388 | 13404 |
| 1896 | GCCATAACCTTTCCACA | NC_045512.2 | 3′→5′ | 13389 | 13405 |
| 1897 | AGCCATAACCTTTCCAC | NC_045512.2 | 3′→5′ | 13390 | 13406 |
| 1898 | CAGCCATAACCTTTCCA | NC_045512.2 | 3′→5′ | 13391 | 13407 |
| 1899 | ACAGCCATAACCTTTCC | NC_045512.2 | 3′→5′ | 13392 | 13408 |
| 1900 | TACAGCCATAACCTTTC | NC_045512.2 | 3′→5′ | 13393 | 13409 |
| 1901 | CTACAGCCATAACCTTT | NC_045512.2 | 3′→5′ | 13394 | 13410 |
| 1902 | ACTACAGCCATAACCTT | NC_045512.2 | 3′→5′ | 13395 | 13411 |
| 1903 | AACTACAGCCATAACCT | NC_045512.2 | 3′→5′ | 13396 | 13412 |
| 1904 | CAACTACAGCCATAACC | NC_045512.2 | 3′→5′ | 13397 | 13413 |
| 1905 | ACAACTACAGCCATAAC | NC_045512.2 | 3′→5′ | 13398 | 13414 |
| 1906 | CACAACTACAGCCATAA | NC_045512.2 | 3′→5′ | 13399 | 13415 |
| 1907 | TCACAACTACAGCCATA | NC_045512.2 | 3′→5′ | 13400 | 13416 |
| 1908 | AAACCCGTTTAAAAACG | NC_045512.2 | 3′→5′ | 13458 | 13474 |
| 1909 | CAAACCCGTTTAAAAAC | NC_045512.2 | 3′→5′ | 13459 | 13475 |
| 1910 | GCAAACCCGTTTAAAAA | NC_045512.2 | 3′→5′ | 13460 | 13476 |
| 1911 | CGCAAACCCGTTTAAAA | NC_045512.2 | 3′→5′ | 13461 | 13477 |
| 1912 | CCGCAAACCCGTTTAAA | NC_045512.2 | 3′→5′ | 13462 | 13478 |
| 1913 | ACCGCAAACCCGTTTAA | NC_045512.2 | 3′→5′ | 13463 | 13479 |
| 1914 | CACCGCAAACCCGTTTA | NC_045512.2 | 3′→5′ | 13464 | 13480 |
| 1915 | ACACCGCAAACCCGTTT | NC_045512.2 | 3′→5′ | 13465 | 13481 |
| 1916 | TACACCGCAAACCCGTT | NC_045512.2 | 3′→5′ | 13466 | 13482 |
| 1917 | TTACACCGCAAACCCGT | NC_045512.2 | 3′→5′ | 13467 | 13483 |
| 1918 | CTTACACCGCAAACCCG | NC_045512.2 | 3′→5′ | 13468 | 13484 |
| 1919 | ACTTACACCGCAAACCC | NC_045512.2 | 3′→5′ | 13469 | 13485 |
| 1920 | CACTTACACCGCAAACC | NC_045512.2 | 3′→5′ | 13470 | 13486 |
| 1921 | GCACTTACACCGCAAAC | NC_045512.2 | 3′→5′ | 13471 | 13487 |
| 1922 | TGCACTTACACCGCAAA | NC_045512.2 | 3′→5′ | 13472 | 13488 |
| 1923 | CTGCACTTACACCGCAA | NC_045512.2 | 3′→5′ | 13473 | 13489 |
| 1924 | GCTGCACTTACACCGCA | NC_045512.2 | 3′→5′ | 13474 | 13490 |
| 1925 | GGCTGCACTTACACCGC | NC_045512.2 | 3′→5′ | 13475 | 13491 |
| 1926 | GGGCTGCACTTACACCG | NC_045512.2 | 3′→5′ | 13476 | 13492 |
| 1927 | CGGGCTGCACTTACACC | NC_045512.2 | 3′→5′ | 13477 | 13493 |
| 1928 | ACGGGCTGCACTTACAC | NC_045512.2 | 3′→5′ | 13478 | 13494 |
| 1929 | GACGGGCTGCACTTACA | NC_045512.2 | 3′→5′ | 13479 | 13495 |
| 1930 | AGACGGGCTGCACTTAC | NC_045512.2 | 3′→5′ | 13480 | 13496 |
| 1931 | AAGACGGGCTGCACTTA | NC_045512.2 | 3′→5′ | 13481 | 13497 |
| 1932 | TAAGACGGGCTGCACTT | NC_045512.2 | 3′→5′ | 13482 | 13498 |
| 1933 | GTAAGACGGGCTGCACT | NC_045512.2 | 3′→5′ | 13483 | 13499 |
| 1934 | TGTAAGACGGGCTGCAC | NC_045512.2 | 3′→5′ | 13484 | 13500 |
| 1935 | GTGTAAGACGGGCTGCA | NC_045512.2 | 3′→5′ | 13485 | 13501 |
| 1936 | GGTGTAAGACGGGCTGC | NC_045512.2 | 3′→5′ | 13486 | 13502 |
| 1937 | CGGTGTAAGACGGGCTG | NC_045512.2 | 3′→5′ | 13487 | 13503 |
| 1938 | ACGGTGTAAGACGGGCT | NC_045512.2 | 3′→5′ | 13488 | 13504 |
| 1939 | CACGGTGTAAGACGGGC | NC_045512.2 | 3′→5′ | 13489 | 13505 |
| 1940 | GCACGGTGTAAGACGGG | NC_045512.2 | 3′→5′ | 13490 | 13506 |
| 1941 | CGCACGGTGTAAGACGG | NC_045512.2 | 3′→5′ | 13491 | 13507 |
| 1942 | CCGCACGGTGTAAGACG | NC_045512.2 | 3′→5′ | 13492 | 13508 |
| 1943 | GCCGCACGGTGTAAGAC | NC_045512.2 | 3′→5′ | 13493 | 13509 |
| 1944 | TGCCGCACGGTGTAAGA | NC_045512.2 | 3′→5′ | 13494 | 13510 |
| 1945 | GTGCCGCACGGTGTAAG | NC_045512.2 | 3′→5′ | 13495 | 13511 |
| 1946 | TGTGCCGCACGGTGTAA | NC_045512.2 | 3′→5′ | 13496 | 13512 |
| 1947 | CTGTGCCGCACGGTGTA | NC_045512.2 | 3′→5′ | 13497 | 13513 |
| 1948 | CCTGTGCCGCACGGTGT | NC_045512.2 | 3′→5′ | 13498 | 13514 |
| 1949 | GCCTGTGCCGCACGGTG | NC_045512.2 | 3′→5′ | 13499 | 13515 |
| 1950 | TGCCTGTGCCGCACGGT | NC_045512.2 | 3′→5′ | 13500 | 13516 |
| 1951 | GTGCCTGTGCCGCACGG | NC_045512.2 | 3′→5′ | 13501 | 13517 |
| 1952 | AGTGCCTGTGCCGCACG | NC_045512.2 | 3′→5′ | 13502 | 13518 |
| 1953 | TAGTGCCTGTGCCGCAC | NC_045512.2 | 3′→5′ | 13503 | 13519 |
| 1954 | CTAGTGCCTGTGCCGCA | NC_045512.2 | 3′→5′ | 13504 | 13520 |
| 1955 | CAATTAGTTTTTAGGAA | NC_045512.2 | 3′→5′ | 13582 | 13598 |
| 1956 | TCTTCATGTTGGTAGTT | NC_045512.2 | 3′→5′ | 13675 | 13691 |
| 1957 | TGTGGTACCATGTCACC | NC_045512.2 | 3′→5′ | 13762 | 13778 |
| 1958 | ATGTGGTACCATGTCAC | NC_045512.2 | 3′→5′ | 13763 | 13779 |
| 1959 | TATGTGGTACCATGTCA | NC_045512.2 | 3′→5′ | 13764 | 13780 |
| 1960 | ATATGTGGTACCATGTC | NC_045512.2 | 3′→5′ | 13765 | 13781 |
| 1961 | TATATGTGGTACCATGT | NC_045512.2 | 3′→5′ | 13766 | 13782 |
| 1962 | ATATATGTGGTACCATG | NC_045512.2 | 3′→5′ | 13767 | 13783 |
| 1963 | GATATATGTGGTACCAT | NC_045512.2 | 3′→5′ | 13768 | 13784 |
| 1964 | TGATATATGTGGTACCA | NC_045512.2 | 3′→5′ | 13769 | 13785 |
| 1965 | GTGATATATGTGGTACC | NC_045512.2 | 3′→5′ | 13770 | 13786 |
| 1966 | CGTGATATATGTGGTAC | NC_045512.2 | 3′→5′ | 13771 | 13787 |
| 1967 | ACGTGATATATGTGGTA | NC_045512.2 | 3′→5′ | 13772 | 13788 |
| 1968 | GACGTGATATATGTGGT | NC_045512.2 | 3′→5′ | 13773 | 13789 |
| 1969 | TGACGTGATATATGTGG | NC_045512.2 | 3′→5′ | 13774 | 13790 |
| 1970 | GCCATTGTGTATTTAGT | NC_045512.2 | 3′→5′ | 13798 | 13814 |
| 1971 | TATTTAAAATAACGGTC | NC_045512.2 | 3′→5′ | 14290 | 14306 |
| 1972 | ATATTTAAAATAACGGT | NC_045512.2 | 3′→5′ | 14291 | 14307 |
| 1973 | AATATTTAAAATAACGG | NC_045512.2 | 3′→5′ | 14292 | 14308 |
| 1974 | CAATATTTAAAATAACG | NC_045512.2 | 3′→5′ | 14293 | 14309 |
| 1975 | CCAATATTTAAAATAAC | NC_045512.2 | 3′→5′ | 14294 | 14310 |
| 1976 | CCCAATATTTAAAATAA | NC_045512.2 | 3′→5′ | 14295 | 14311 |
| 1977 | TCCCAATATTTAAAATA | NC_045512.2 | 3′→5′ | 14296 | 14312 |
| 1978 | CCAAAACTTGTAGGTGG | NC_045512.2 | 3′→5′ | 14404 | 14420 |
| 1979 | TCCAAAACTTGTAGGTG | NC_045512.2 | 3′→5′ | 14405 | 14421 |
| 1980 | GTCCAAAACTTGTAGGT | NC_045512.2 | 3′→5′ | 14406 | 14422 |
| 1981 | GGTCCAAAACTTGTAGG | NC_045512.2 | 3′→5′ | 14407 | 14423 |
| 1982 | TGGTCCAAAACTTGTAG | NC_045512.2 | 3′→5′ | 14408 | 14424 |
| 1983 | GTGGTCCAAAACTTGTA | NC_045512.2 | 3′→5′ | 14409 | 14425 |
| 1984 | AGTGGTCCAAAACTTGT | NC_045512.2 | 3′→5′ | 14410 | 14426 |
| 1985 | TAGTGGTCCAAAACTTG | NC_045512.2 | 3′→5′ | 14411 | 14427 |
| 1986 | CTAGTGGTCCAAAACTT | NC_045512.2 | 3′→5′ | 14412 | 14428 |
| 1987 | ACTAGTGGTCCAAAACT | NC_045512.2 | 3′→5′ | 14413 | 14429 |
| 1988 | ACATCCTGATTATGTAC | NC_045512.2 | 3′→5′ | 14500 | 14516 |
| 1989 | TACATCCTGATTATGTA | NC_045512.2 | 3′→5′ | 14501 | 14517 |
| 1990 | TTACATCCTGATTATGT | NC_045512.2 | 3′→5′ | 14502 | 14518 |
| 1991 | TTTACATCCTGATTATG | NC_045512.2 | 3′→5′ | 14503 | 14519 |
| 1992 | GTTTACATCCTGATTAT | NC_045512.2 | 3′→5′ | 14504 | 14520 |
| 1993 | AGTTTACATCCTGATTA | NC_045512.2 | 3′→5′ | 14505 | 14521 |
| 1994 | AAGTTTACATCCTGATT | NC_045512.2 | 3′→5′ | 14506 | 14522 |
| 1995 | TAAGTTTACATCCTGAT | NC_045512.2 | 3′→5′ | 14507 | 14523 |
| 1996 | GTAAGTTTACATCCTGA | NC_045512.2 | 3′→5′ | 14508 | 14524 |
| 1997 | TGTAAGTTTACATCCTG | NC_045512.2 | 3′→5′ | 14509 | 14525 |
| 1998 | ATGTAAGTTTACATCCT | NC_045512.2 | 3′→5′ | 14510 | 14526 |
| 1999 | TATGTAAGTTTACATCC | NC_045512.2 | 3′→5′ | 14511 | 14527 |
| 2000 | CTATGTAAGTTTACATC | NC_045512.2 | 3′→5′ | 14512 | 14528 |
| 2001 | GCTATGTAAGTTTACAT | NC_045512.2 | 3′→5′ | 14513 | 14529 |
| 2002 | AGCTATGTAAGTTTACA | NC_045512.2 | 3′→5′ | 14514 | 14530 |
| 2003 | GAGCTATGTAAGTTTAC | NC_045512.2 | 3′→5′ | 14515 | 14531 |
| 2004 | GTAGTGCGTTTATCTAG | NC_045512.2 | 3′→5′ | 14605 | 14621 |
| 2005 | GCAGCTACTGAAAAGCA | NC_045512.2 | 3′→5′ | 14623 | 14639 |
| 2006 | TGCAGCTACTGAAAAGC | NC_045512.2 | 3′→5′ | 14624 | 14640 |
| 2007 | GTGCAGCTACTGAAAAG | NC_045512.2 | 3′→5′ | 14625 | 14641 |
| 2008 | AGTGCAGCTACTGAAAA | NC_045512.2 | 3′→5′ | 14626 | 14642 |
| 2009 | GTTTGAAAAGCAACATT | NC_045512.2 | 3′→5′ | 14650 | 14666 |
| 2010 | AGTTTGAAAAGCAACAT | NC_045512.2 | 3′→5′ | 14651 | 14667 |
| 2011 | CAGTTTGAAAAGCAACA | NC_045512.2 | 3′→5′ | 14652 | 14668 |
| 2012 | ACAGTTTGAAAAGCAAC | NC_045512.2 | 3′→5′ | 14653 | 14669 |
| 2013 | GACAGTTTGAAAAGCAA | NC_045512.2 | 3′→5′ | 14654 | 14670 |
| 2014 | TGACAGTTTGAAAAGCA | NC_045512.2 | 3′→5′ | 14655 | 14671 |
| 2015 | TTGACAGTTTGAAAAGC | NC_045512.2 | 3′→5′ | 14656 | 14672 |
| 2016 | TTTGACAGTTTGAAAAG | NC_045512.2 | 3′→5′ | 14657 | 14673 |
| 2017 | GTTTGACAGTTTGAAAA | NC_045512.2 | 3′→5′ | 14658 | 14674 |
| 2018 | GGTTTGACAGTTTGAAA | NC_045512.2 | 3′→5′ | 14659 | 14675 |
| 2019 | GGGTTTGACAGTTTGAA | NC_045512.2 | 3′→5′ | 14660 | 14676 |
| 2020 | CGGGTTTGACAGTTTGA | NC_045512.2 | 3′→5′ | 14661 | 14677 |
| 2021 | CCGGGTTTGACAGTTTG | NC_045512.2 | 3′→5′ | 14662 | 14678 |
| 2022 | ACCGGGTTTGACAGTTT | NC_045512.2 | 3′→5′ | 14663 | 14679 |
| 2023 | TACCGGGTTTGACAGTT | NC_045512.2 | 3′→5′ | 14664 | 14680 |
| 2024 | TTACCGGGTTTGACAGT | NC_045512.2 | 3′→5′ | 14665 | 14681 |
| 2025 | ATTACCGGGTTTGACAG | NC_045512.2 | 3′→5′ | 14666 | 14682 |
| 2026 | AATTACCGGGTTTGACA | NC_045512.2 | 3′→5′ | 14667 | 14683 |
| 2027 | AAATTACCGGGTTTGAC | NC_045512.2 | 3′→5′ | 14668 | 14684 |
| 2028 | AAAATTACCGGGTTTGA | NC_045512.2 | 3′→5′ | 14669 | 14685 |
| 2029 | TAAAATTACCGGGTTTG | NC_045512.2 | 3′→5′ | 14670 | 14686 |
| 2030 | TTAAAATTACCGGGTTT | NC_045512.2 | 3′→5′ | 14671 | 14687 |
| 2031 | GACACAGCAAAGTCATA | NC_045512.2 | 3′→5′ | 14698 | 14714 |
| 2032 | AGACACAGCAAAGTCAT | NC_045512.2 | 3′→5′ | 14699 | 14715 |
| 2033 | TAGACACAGCAAAGTCA | NC_045512.2 | 3′→5′ | 14700 | 14716 |
| 2034 | TTAGACACAGCAAAGTC | NC_045512.2 | 3′→5′ | 14701 | 14717 |
| 2035 | CTTCCTTCCTTAAAGAA | NC_045512.2 | 3′→5′ | 14722 | 14738 |
| 2036 | ACTTCCTTCCTTAAAGA | NC_045512.2 | 3′→5′ | 14723 | 14739 |
| 2037 | AACTTCCTTCCTTAAAG | NC_045512.2 | 3′→5′ | 14724 | 14740 |
| 2038 | GAACTTCCTTCCTTAAA | NC_045512.2 | 3′→5′ | 14725 | 14741 |
| 2039 | AGAACTTCCTTCCTTAA | NC_045512.2 | 3′→5′ | 14726 | 14742 |
| 2040 | CAGAACTTCCTTCCTTA | NC_045512.2 | 3′→5′ | 14727 | 14743 |
| 2041 | ACAGAACTTCCTTCCTT | NC_045512.2 | 3′→5′ | 14728 | 14744 |
| 2042 | AACAGAACTTCCTTCCT | NC_045512.2 | 3′→5′ | 14729 | 14745 |
| 2043 | CAACAGAACTTCCTTCC | NC_045512.2 | 3′→5′ | 14730 | 14746 |
| 2044 | TCAACAGAACTTCCTTC | NC_045512.2 | 3′→5′ | 14731 | 14747 |
| 2045 | TTCAACAGAACTTCCTT | NC_045512.2 | 3′→5′ | 14732 | 14748 |
| 2046 | AAAGAAGAAGTGTTTTA | NC_045512.2 | 3′→5′ | 14750 | 14766 |
| 2047 | CAAAGAAGAAGTGTTTT | NC_045512.2 | 3′→5′ | 14751 | 14767 |
| 2048 | GCAAAGAAGAAGTGTTT | NC_045512.2 | 3′→5′ | 14752 | 14768 |
| 2049 | AGCAAAGAAGAAGTGTT | NC_045512.2 | 3′→5′ | 14753 | 14769 |
| 2050 | GAGCAAAGAAGAAGTGT | NC_045512.2 | 3′→5′ | 14754 | 14770 |
| 2051 | TGAGCAAAGAAGAAGTG | NC_045512.2 | 3′→5′ | 14755 | 14771 |
| 2052 | CTGAGCAAAGAAGAAGT | NC_045512.2 | 3′→5′ | 14756 | 14772 |
| 2053 | CCTGAGCAAAGAAGAAG | NC_045512.2 | 3′→5′ | 14757 | 14773 |
| 2054 | TCCTGAGCAAAGAAGAA | NC_045512.2 | 3′→5′ | 14758 | 14774 |
| 2055 | ATCCTGAGCAAAGAAGA | NC_045512.2 | 3′→5′ | 14759 | 14775 |
| 2056 | CATCCTGAGCAAAGAAG | NC_045512.2 | 3′→5′ | 14760 | 14776 |
| 2057 | CCATCCTGAGCAAAGAA | NC_045512.2 | 3′→5′ | 14761 | 14777 |
| 2058 | ATATCACACATTGTTGG | NC_045512.2 | 3′→5′ | 14821 | 14837 |
| 2059 | GATATCACACATTGTTG | NC_045512.2 | 3′→5′ | 14822 | 14838 |
| 2060 | TGATATCACACATTGTT | NC_045512.2 | 3′→5′ | 14823 | 14839 |
| 2061 | CTGATATCACACATTGT | NC_045512.2 | 3′→5′ | 14824 | 14840 |
| 2062 | TCTGATATCACACATTG | NC_045512.2 | 3′→5′ | 14825 | 14841 |
| 2063 | GTCTGATATCACACATT | NC_045512.2 | 3′→5′ | 14826 | 14842 |
| 2064 | TGTCTGATATCACACAT | NC_045512.2 | 3′→5′ | 14827 | 14843 |
| 2065 | TTGTCTGATATCACACA | NC_045512.2 | 3′→5′ | 14828 | 14844 |
| 2066 | GTTGTCTGATATCACAC | NC_045512.2 | 3′→5′ | 14829 | 14845 |
| 2067 | AGTTGTCTGATATCACA | NC_045512.2 | 3′→5′ | 14830 | 14846 |
| 2068 | TCAACAACTTCAACTAC | NC_045512.2 | 3′→5′ | 14854 | 14870 |
| 2069 | ATCAACAACTTCAACTA | NC_045512.2 | 3′→5′ | 14855 | 14871 |
| 2070 | TATCAACAACTTCAACT | NC_045512.2 | 3′→5′ | 14856 | 14872 |
| 2071 | TTATCAACAACTTCAAC | NC_045512.2 | 3′→5′ | 14857 | 14873 |
| 2072 | TCGTAACAATCAAAGTA | NC_045512.2 | 3′→5′ | 14875 | 14891 |
| 2073 | ATCGTAACAATCAAAGT | NC_045512.2 | 3′→5′ | 14876 | 14892 |
| 2074 | CATCGTAACAATCAAAG | NC_045512.2 | 3′→5′ | 14877 | 14893 |
| 2075 | CCATCGTAACAATCAAA | NC_045512.2 | 3′→5′ | 14878 | 14894 |
| 2076 | ACCATCGTAACAATCAA | NC_045512.2 | 3′→5′ | 14879 | 14895 |
| 2077 | CACCATCGTAACAATCA | NC_045512.2 | 3′→5′ | 14880 | 14896 |
| 2078 | CCACCATCGTAACAATC | NC_045512.2 | 3′→5′ | 14881 | 14897 |
| 2079 | GCCACCATCGTAACAAT | NC_045512.2 | 3′→5′ | 14882 | 14898 |
| 2080 | AGCCACCATCGTAACAA | NC_045512.2 | 3′→5′ | 14883 | 14899 |
| 2081 | CAGCCACCATCGTAACA | NC_045512.2 | 3′→5′ | 14884 | 14900 |
| 2082 | ACAGCCACCATCGTAAC | NC_045512.2 | 3′→5′ | 14885 | 14901 |
| 2083 | TACAGCCACCATCGTAA | NC_045512.2 | 3′→5′ | 14886 | 14902 |
| 2084 | ATACAGCCACCATCGTA | NC_045512.2 | 3′→5′ | 14887 | 14903 |
| 2085 | CTAGCCTTACCCCATTT | NC_045512.2 | 3′→5′ | 14962 | 14978 |
| 2086 | TCTAGCCTTACCCCATT | NC_045512.2 | 3′→5′ | 14963 | 14979 |
| 2087 | GTCTAGCCTTACCCCAT | NC_045512.2 | 3′→5′ | 14964 | 14980 |
| 2088 | AGTCTAGCCTTACCCCA | NC_045512.2 | 3′→5′ | 14965 | 14981 |
| 2089 | AAGTCTAGCCTTACCCC | NC_045512.2 | 3′→5′ | 14966 | 14982 |
| 2090 | AAAGTCTAGCCTTACCC | NC_045512.2 | 3′→5′ | 14967 | 14983 |
| 2091 | TAAAGTCTAGCCTTACC | NC_045512.2 | 3′→5′ | 14968 | 14984 |
| 2092 | ATAAAGTCTAGCCTTAC | NC_045512.2 | 3′→5′ | 14969 | 14985 |
| 2093 | AATAAAGTCTAGCCTTA | NC_045512.2 | 3′→5′ | 14970 | 14986 |
| 2094 | TAATAAAGTCTAGCCTT | NC_045512.2 | 3′→5′ | 14971 | 14987 |
| 2095 | ATAATAAAGTCTAGCCT | NC_045512.2 | 3′→5′ | 14972 | 14988 |
| 2096 | CATAATAAAGTCTAGCC | NC_045512.2 | 3′→5′ | 14973 | 14989 |
| 2097 | TCATAATAAAGTCTAGC | NC_045512.2 | 3′→5′ | 14974 | 14990 |
| 2098 | TCCTCATAACTCATTGA | NC_045512.2 | 3′→5′ | 14992 | 15008 |
| 2099 | ATCCTCATAACTCATTG | NC_045512.2 | 3′→5′ | 14993 | 15009 |
| 2100 | GATCCTCATAACTCATT | NC_045512.2 | 3′→5′ | 14994 | 15010 |
| 2101 | TGATCCTCATAACTCAT | NC_045512.2 | 3′→5′ | 14995 | 15011 |
| 2102 | TTGATCCTCATAACTCA | NC_045512.2 | 3′→5′ | 14996 | 15012 |
| 2103 | CTTGATCCTCATAACTC | NC_045512.2 | 3′→5′ | 14997 | 15013 |
| 2104 | TCTTGATCCTCATAACT | NC_045512.2 | 3′→5′ | 14998 | 15014 |
| 2105 | ATCTTGATCCTCATAAC | NC_045512.2 | 3′→5′ | 14999 | 15015 |
| 2106 | CATCTTGATCCTCATAA | NC_045512.2 | 3′→5′ | 15000 | 15016 |
| 2107 | GCATCTTGATCCTCATA | NC_045512.2 | 3′→5′ | 15001 | 15017 |
| 2108 | TGCATCTTGATCCTCAT | NC_045512.2 | 3′→5′ | 15002 | 15018 |
| 2109 | GTGCATCTTGATCCTCA | NC_045512.2 | 3′→5′ | 15003 | 15019 |
| 2110 | AGTGCATCTTGATCCTC | NC_045512.2 | 3′→5′ | 15004 | 15020 |
| 2111 | GTAGGGATGACATTACG | NC_045512.2 | 3′→5′ | 15037 | 15053 |
| 2112 | AGATTCATTTGAGTTAT | NC_045512.2 | 3′→5′ | 15055 | 15071 |
| 2113 | AAGATTCATTTGAGTTA | NC_045512.2 | 3′→5′ | 15056 | 15072 |
| 2114 | TAAGATTCATTTGAGTT | NC_045512.2 | 3′→5′ | 15057 | 15073 |
| 2115 | TTAAGATTCATTTGAGT | NC_045512.2 | 3′→5′ | 15058 | 15074 |
| 2116 | CTTAAGATTCATTTGAG | NC_045512.2 | 3′→5′ | 15059 | 15075 |
| 2117 | ACTTAAGATTCATTTGA | NC_045512.2 | 3′→5′ | 15060 | 15076 |
| 2118 | TACTTAAGATTCATTTG | NC_045512.2 | 3′→5′ | 15061 | 15077 |
| 2119 | ATACTTAAGATTCATTT | NC_045512.2 | 3′→5′ | 15062 | 15078 |
| 2120 | CATACTTAAGATTCATT | NC_045512.2 | 3′→5′ | 15063 | 15079 |
| 2121 | GCATACTTAAGATTCAT | NC_045512.2 | 3′→5′ | 15064 | 15080 |
| 2122 | GGCATACTTAAGATTCA | NC_045512.2 | 3′→5′ | 15065 | 15081 |
| 2123 | TGGCATACTTAAGATTC | NC_045512.2 | 3′→5′ | 15066 | 15082 |
| 2124 | ATGGCATACTTAAGATT | NC_045512.2 | 3′→5′ | 15067 | 15083 |
| 2125 | AATGGCATACTTAAGAT | NC_045512.2 | 3′→5′ | 15068 | 15084 |
| 2126 | TAATGGCATACTTAAGA | NC_045512.2 | 3′→5′ | 15069 | 15085 |
| 2127 | CTAATGGCATACTTAAG | NC_045512.2 | 3′→5′ | 15070 | 15086 |
| 2128 | ACTAATGGCATACTTAA | NC_045512.2 | 3′→5′ | 15071 | 15087 |
| 2129 | CACTAATGGCATACTTA | NC_045512.2 | 3′→5′ | 15072 | 15088 |
| 2130 | GCACTAATGGCATACTT | NC_045512.2 | 3′→5′ | 15073 | 15089 |
| 2131 | TGCACTAATGGCATACT | NC_045512.2 | 3′→5′ | 15074 | 15090 |
| 2132 | TTGCACTAATGGCATAC | NC_045512.2 | 3′→5′ | 15075 | 15091 |
| 2133 | TTTGCACTAATGGCATA | NC_045512.2 | 3′→5′ | 15076 | 15092 |
| 2134 | CTTTGCACTAATGGCAT | NC_045512.2 | 3′→5′ | 15077 | 15093 |
| 2135 | TCTTTGCACTAATGGCA | NC_045512.2 | 3′→5′ | 15078 | 15094 |
| 2136 | TTCTTTGCACTAATGGC | NC_045512.2 | 3′→5′ | 15079 | 15095 |
| 2137 | ATTCTTTGCACTAATGG | NC_045512.2 | 3′→5′ | 15080 | 15096 |
| 2138 | TATTCTTTGCACTAATG | NC_045512.2 | 3′→5′ | 15081 | 15097 |
| 2139 | CTATTCTTTGCACTAAT | NC_045512.2 | 3′→5′ | 15082 | 15098 |
| 2140 | TCTATTCTTTGCACTAA | NC_045512.2 | 3′→5′ | 15083 | 15099 |
| 2141 | CTCTATTCTTTGCACTA | NC_045512.2 | 3′→5′ | 15084 | 15100 |
| 2142 | GCTCTATTCTTTGCACT | NC_045512.2 | 3′→5′ | 15085 | 15101 |
| 2143 | AGCTCTATTCTTTGCAC | NC_045512.2 | 3′→5′ | 15086 | 15102 |
| 2144 | GAGCTCTATTCTTTGCA | NC_045512.2 | 3′→5′ | 15087 | 15103 |
| 2145 | CGAGCTCTATTCTTTGC | NC_045512.2 | 3′→5′ | 15088 | 15104 |
| 2146 | GCGAGCTCTATTCTTTG | NC_045512.2 | 3′→5′ | 15089 | 15105 |
| 2147 | TGCGAGCTCTATTCTTT | NC_045512.2 | 3′→5′ | 15090 | 15106 |
| 2148 | GTGCGAGCTCTATTCTT | NC_045512.2 | 3′→5′ | 15091 | 15107 |
| 2149 | GGTGCGAGCTCTATTCT | NC_045512.2 | 3′→5′ | 15092 | 15108 |
| 2150 | CGGTGCGAGCTCTATTC | NC_045512.2 | 3′→5′ | 15093 | 15109 |
| 2151 | ACGGTGCGAGCTCTATT | NC_045512.2 | 3′→5′ | 15094 | 15110 |
| 2152 | TACGGTGCGAGCTCTAT | NC_045512.2 | 3′→5′ | 15095 | 15111 |
| 2153 | CTACGGTGCGAGCTCTA | NC_045512.2 | 3′→5′ | 15096 | 15112 |
| 2154 | GCTACGGTGCGAGCTCT | NC_045512.2 | 3′→5′ | 15097 | 15113 |
| 2155 | AGCTACGGTGCGAGCTC | NC_045512.2 | 3′→5′ | 15098 | 15114 |
| 2156 | CAGCTACGGTGCGAGCT | NC_045512.2 | 3′→5′ | 15099 | 15115 |
| 2157 | CCAGCTACGGTGCGAGC | NC_045512.2 | 3′→5′ | 15100 | 15116 |
| 2158 | ACCAGCTACGGTGCGAG | NC_045512.2 | 3′→5′ | 15101 | 15117 |
| 2159 | CACCAGCTACGGTGCGA | NC_045512.2 | 3′→5′ | 15102 | 15118 |
| 2160 | ACACCAGCTACGGTGCG | NC_045512.2 | 3′→5′ | 15103 | 15119 |
| 2161 | GACACCAGCTACGGTGC | NC_045512.2 | 3′→5′ | 15104 | 15120 |
| 2162 | AGACACCAGCTACGGTG | NC_045512.2 | 3′→5′ | 15105 | 15121 |
| 2163 | GAGACACCAGCTACGGT | NC_045512.2 | 3′→5′ | 15106 | 15122 |
| 2164 | AGAGACACCAGCTACGG | NC_045512.2 | 3′→5′ | 15107 | 15123 |
| 2165 | TAGAGACACCAGCTACG | NC_045512.2 | 3′→5′ | 15108 | 15124 |
| 2166 | ATAGAGACACCAGCTAC | NC_045512.2 | 3′→5′ | 15109 | 15125 |
| 2167 | GATAGAGACACCAGCTA | NC_045512.2 | 3′→5′ | 15110 | 15126 |
| 2168 | AGATAGAGACACCAGCT | NC_045512.2 | 3′→5′ | 15111 | 15127 |
| 2169 | CAGATAGAGACACCAGC | NC_045512.2 | 3′→5′ | 15112 | 15128 |
| 2170 | ACAGATAGAGACACCAG | NC_045512.2 | 3′→5′ | 15113 | 15129 |
| 2171 | TACAGATAGAGACACCA | NC_045512.2 | 3′→5′ | 15114 | 15130 |
| 2172 | CTACAGATAGAGACACC | NC_045512.2 | 3′→5′ | 15115 | 15131 |
| 2173 | ACTACAGATAGAGACAC | NC_045512.2 | 3′→5′ | 15116 | 15132 |
| 2174 | TACTACAGATAGAGACA | NC_045512.2 | 3′→5′ | 15117 | 15133 |
| 2175 | GTACTACAGATAGAGAC | NC_045512.2 | 3′→5′ | 15118 | 15134 |
| 2176 | AGTACTACAGATAGAGA | NC_045512.2 | 3′→5′ | 15119 | 15135 |
| 2177 | TAGTACTACAGATAGAG | NC_045512.2 | 3′→5′ | 15120 | 15136 |
| 2178 | ATAGTACTACAGATAGA | NC_045512.2 | 3′→5′ | 15121 | 15137 |
| 2179 | CATAGTACTACAGATAG | NC_045512.2 | 3′→5′ | 15122 | 15138 |
| 2180 | TCATAGTACTACAGATA | NC_045512.2 | 3′→5′ | 15123 | 15139 |
| 2181 | GTCATAGTACTACAGAT | NC_045512.2 | 3′→5′ | 15124 | 15140 |
| 2182 | TGATGAAACTGTCTATT | NC_045512.2 | 3′→5′ | 15142 | 15158 |
| 2183 | CTAGTGGCGGCTATTGA | NC_045512.2 | 3′→5′ | 15172 | 15188 |
| 2184 | TCTAGTGGCGGCTATTG | NC_045512.2 | 3′→5′ | 15173 | 15189 |
| 2185 | CTCTAGTGGCGGCTATT | NC_045512.2 | 3′→5′ | 15174 | 15190 |
| 2186 | CCTCTAGTGGCGGCTAT | NC_045512.2 | 3′→5′ | 15175 | 15191 |
| 2187 | TCCTCTAGTGGCGGCTA | NC_045512.2 | 3′→5′ | 15176 | 15192 |
| 2188 | CTCCTCTAGTGGCGGCT | NC_045512.2 | 3′→5′ | 15177 | 15193 |
| 2189 | GCTCCTCTAGTGGCGGC | NC_045512.2 | 3′→5′ | 15178 | 15194 |
| 2190 | AGCTCCTCTAGTGGCGG | NC_045512.2 | 3′→5′ | 15179 | 15195 |
| 2191 | TAGCTCCTCTAGTGGCG | NC_045512.2 | 3′→5′ | 15180 | 15196 |
| 2192 | GTAGCTCCTCTAGTGGC | NC_045512.2 | 3′→5′ | 15181 | 15197 |
| 2193 | AGTAGCTCCTCTAGTGG | NC_045512.2 | 3′→5′ | 15182 | 15198 |
| 2194 | CAGTAGCTCCTCTAGTG | NC_045512.2 | 3′→5′ | 15183 | 15199 |
| 2195 | ACAGTAGCTCCTCTAGT | NC_045512.2 | 3′→5′ | 15184 | 15200 |
| 2196 | TTGCTTGTTCCAATTAC | NC_045512.2 | 3′→5′ | 15202 | 15218 |
| 2197 | TAAACAGTTTTTAACAT | NC_045512.2 | 3′→5′ | 15241 | 15257 |
| 2198 | TCCCAACCCATAAGGTG | NC_045512.2 | 3′→5′ | 15277 | 15293 |
| 2199 | ATGTTAGGCATGGCTCT | NC_045512.2 | 3′→5′ | 15310 | 15326 |
| 2200 | CATGTTAGGCATGGCTC | NC_045512.2 | 3′→5′ | 15311 | 15327 |
| 2201 | GCATGTTAGGCATGGCT | NC_045512.2 | 3′→5′ | 15312 | 15328 |
| 2202 | AGCATGTTAGGCATGGC | NC_045512.2 | 3′→5′ | 15313 | 15329 |
| 2203 | AAGCATGTTAGGCATGG | NC_045512.2 | 3′→5′ | 15314 | 15330 |
| 2204 | TAAGCATGTTAGGCATG | NC_045512.2 | 3′→5′ | 15315 | 15331 |
| 2205 | CTAAGCATGTTAGGCAT | NC_045512.2 | 3′→5′ | 15316 | 15332 |
| 2206 | TTGCGAGCAAGAACAAG | NC_045512.2 | 3′→5′ | 15346 | 15362 |
| 2207 | TTTGCGAGCAAGAACAA | NC_045512.2 | 3′→5′ | 15347 | 15363 |
| 2208 | GTTTGCGAGCAAGAACA | NC_045512.2 | 3′→5′ | 15348 | 15364 |
| 2209 | TGTTTGCGAGCAAGAAC | NC_045512.2 | 3′→5′ | 15349 | 15365 |
| 2210 | ATGTTTGCGAGCAAGAA | NC_045512.2 | 3′→5′ | 15350 | 15366 |
| 2211 | TATGTTTGCGAGCAAGA | NC_045512.2 | 3′→5′ | 15351 | 15367 |
| 2212 | CCGCCACACATGACCAT | NC_045512.2 | 3′→5′ | 15436 | 15452 |
| 2213 | TTAGCATAAGCAGTTGT | NC_045512.2 | 3′→5′ | 15496 | 15512 |
| 2214 | ATTAGCATAAGCAGTTG | NC_045512.2 | 3′→5′ | 15497 | 15513 |
| 2215 | TATTAGCATAAGCAGTT | NC_045512.2 | 3′→5′ | 15498 | 15514 |
| 2216 | CTATTAGCATAAGCAGT | NC_045512.2 | 3′→5′ | 15499 | 15515 |
| 2217 | ACTATTAGCATAAGCAG | NC_045512.2 | 3′→5′ | 15500 | 15516 |
| 2218 | CACTATTAGCATAAGCA | NC_045512.2 | 3′→5′ | 15501 | 15517 |
| 2219 | ACACTATTAGCATAAGC | NC_045512.2 | 3′→5′ | 15502 | 15518 |
| 2220 | GCTTGACAAATGTTAAA | NC_045512.2 | 3′→5′ | 15520 | 15536 |
| 2221 | CTATAGAGACACTCATA | NC_045512.2 | 3′→5′ | 15622 | 15638 |
| 2222 | TCTATAGAGACACTCAT | NC_045512.2 | 3′→5′ | 15623 | 15639 |
| 2223 | TTCTATAGAGACACTCA | NC_045512.2 | 3′→5′ | 15624 | 15640 |
| 2224 | TTTCTATAGAGACACTC | NC_045512.2 | 3′→5′ | 15625 | 15641 |
| 2225 | ATTTCTATAGAGACACT | NC_045512.2 | 3′→5′ | 15626 | 15642 |
| 2226 | TATTTCTATAGAGACAC | NC_045512.2 | 3′→5′ | 15627 | 15643 |
| 2227 | CTATTTCTATAGAGACA | NC_045512.2 | 3′→5′ | 15628 | 15644 |
| 2228 | AGGTCAGTCTCAGTCCA | NC_045512.2 | 3′→5′ | 15838 | 15854 |
| 2229 | AAGGTCAGTCTCAGTCC | NC_045512.2 | 3′→5′ | 15839 | 15855 |
| 2230 | TAAGGTCAGTCTCAGTC | NC_045512.2 | 3′→5′ | 15840 | 15856 |
| 2231 | GTAAGGTCAGTCTCAGT | NC_045512.2 | 3′→5′ | 15841 | 15857 |
| 2232 | AGTAAGGTCAGTCTCAG | NC_045512.2 | 3′→5′ | 15842 | 15858 |
| 2233 | TAGTAAGGTCAGTCTCA | NC_045512.2 | 3′→5′ | 15843 | 15859 |
| 2234 | TTAGTAAGGTCAGTCTC | NC_045512.2 | 3′→5′ | 15844 | 15860 |
| 2235 | TTTAGTAAGGTCAGTCT | NC_045512.2 | 3′→5′ | 15845 | 15861 |
| 2236 | CTTTAGTAAGGTCAGTC | NC_045512.2 | 3′→5′ | 15846 | 15862 |
| 2237 | CCTTTAGTAAGGTCAGT | NC_045512.2 | 3′→5′ | 15847 | 15863 |
| 2238 | TCCTTTAGTAAGGTCAG | NC_045512.2 | 3′→5′ | 15848 | 15864 |
| 2239 | GTCCTTTAGTAAGGTCA | NC_045512.2 | 3′→5′ | 15849 | 15865 |
| 2240 | GGTCCTTTAGTAAGGTC | NC_045512.2 | 3′→5′ | 15850 | 15866 |
| 2241 | AGGTCCTTTAGTAAGGT | NC_045512.2 | 3′→5′ | 15851 | 15867 |
| 2242 | GAGGTCCTTTAGTAAGG | NC_045512.2 | 3′→5′ | 15852 | 15868 |
| 2243 | TGAGGTCCTTTAGTAAG | NC_045512.2 | 3′→5′ | 15853 | 15869 |
| 2244 | TTAACTAGCATTGTATG | NC_045512.2 | 3′→5′ | 15886 | 15902 |
| 2245 | TTTAACTAGCATTGTAT | NC_045512.2 | 3′→5′ | 15887 | 15903 |
| 2246 | GTTTAACTAGCATTGTA | NC_045512.2 | 3′→5′ | 15888 | 15904 |
| 2247 | TGTTTAACTAGCATTGT | NC_045512.2 | 3′→5′ | 15889 | 15905 |
| 2248 | GATGGATCTGGGTAAGG | NC_045512.2 | 3′→5′ | 15928 | 15944 |
| 2249 | AGTGTACCATCTGTTTT | NC_045512.2 | 3′→5′ | 15985 | 16001 |
| 2250 | AAGTGTACCATCTGTTT | NC_045512.2 | 3′→5′ | 15986 | 16002 |
| 2251 | TAAGTGTACCATCTGTT | NC_045512.2 | 3′→5′ | 15987 | 16003 |
| 2252 | ATAAGTGTACCATCTGT | NC_045512.2 | 3′→5′ | 15988 | 16004 |
| 2253 | CATAAGTGTACCATCTG | NC_045512.2 | 3′→5′ | 15989 | 16005 |
| 2254 | TCATAAGTGTACCATCT | NC_045512.2 | 3′→5′ | 15990 | 16006 |
| 2255 | ATCATAAGTGTACCATC | NC_045512.2 | 3′→5′ | 15991 | 16007 |
| 2256 | AATCATAAGTGTACCAT | NC_045512.2 | 3′→5′ | 15992 | 16008 |
| 2257 | CAATCATAAGTGTACCA | NC_045512.2 | 3′→5′ | 15993 | 16009 |
| 2258 | TCAATCATAAGTGTACC | NC_045512.2 | 3′→5′ | 15994 | 16010 |
| 2259 | GCATACTCCTGATTAGG | NC_045512.2 | 3′→5′ | 16057 | 16073 |
| 2260 | AGCATACTCCTGATTAG | NC_045512.2 | 3′→5′ | 16058 | 16074 |
| 2261 | CAGCATACTCCTGATTA | NC_045512.2 | 3′→5′ | 16059 | 16075 |
| 2262 | TCAGCATACTCCTGATT | NC_045512.2 | 3′→5′ | 16060 | 16076 |
| 2263 | ATCAGCATACTCCTGAT | NC_045512.2 | 3′→5′ | 16061 | 16077 |
| 2264 | CATCAGCATACTCCTGA | NC_045512.2 | 3′→5′ | 16062 | 16078 |
| 2265 | ACATCAGCATACTCCTG | NC_045512.2 | 3′→5′ | 16063 | 16079 |
| 2266 | TAAAACTCAGGTTCCCA | NC_045512.2 | 3′→5′ | 16186 | 16202 |
| 2267 | ATAAAACTCAGGTTCCC | NC_045512.2 | 3′→5′ | 16187 | 16203 |
| 2268 | CATAAAACTCAGGTTCC | NC_045512.2 | 3′→5′ | 16188 | 16204 |
| 2269 | TCATAAAACTCAGGTTC | NC_045512.2 | 3′→5′ | 16189 | 16205 |
| 2270 | ATAGCTCATACCTCCTA | NC_045512.2 | 3′→5′ | 16430 | 16446 |
| 2271 | AATAGCTCATACCTCCT | NC_045512.2 | 3′→5′ | 16431 | 16447 |
| 2272 | TAATAGCTCATACCTCC | NC_045512.2 | 3′→5′ | 16432 | 16448 |
| 2273 | AATGGAAAACTAATGGG | NC_045512.2 | 3′→5′ | 16468 | 16484 |
| 2274 | TAACCAGTAAAGACATA | NC_045512.2 | 3′→5′ | 16774 | 16790 |
| 2275 | TCAAAGGTGTACTCTCC | NC_045512.2 | 3′→5′ | 16822 | 16838 |
| 2276 | TTCAAAGGTGTACTCTC | NC_045512.2 | 3′→5′ | 16823 | 16839 |
| 2277 | TTTCAAAGGTGTACTCT | NC_045512.2 | 3′→5′ | 16824 | 16840 |
| 2278 | TTTTCAAAGGTGTACTC | NC_045512.2 | 3′→5′ | 16825 | 16841 |
| 2279 | TTTTTCAAAGGTGTACT | NC_045512.2 | 3′→5′ | 16826 | 16842 |
| 2280 | CTTTTTCAAAGGTGTAC | NC_045512.2 | 3′→5′ | 16827 | 16843 |
| 2281 | CCTTTTTCAAAGGTGTA | NC_045512.2 | 3′→5′ | 16828 | 16844 |
| 2282 | ACCTTTTTCAAAGGTGT | NC_045512.2 | 3′→5′ | 16829 | 16845 |
| 2283 | CACCTTTTTCAAAGGTG | NC_045512.2 | 3′→5′ | 16830 | 16846 |
| 2284 | TCACCTTTTTCAAAGGT | NC_045512.2 | 3′→5′ | 16831 | 16847 |
| 2285 | GTCACCTTTTTCAAAGG | NC_045512.2 | 3′→5′ | 16832 | 16848 |
| 2286 | AGTCACCTTTTTCAAAG | NC_045512.2 | 3′→5′ | 16833 | 16849 |
| 2287 | TAGTCACCTTTTTCAAA | NC_045512.2 | 3′→5′ | 16834 | 16850 |
| 2288 | ATAGTCACCTTTTTCAA | NC_045512.2 | 3′→5′ | 16835 | 16851 |
| 2289 | CATAGTCACCTTTTTCA | NC_045512.2 | 3′→5′ | 16836 | 16852 |
| 2290 | CCATAGTCACCTTTTTC | NC_045512.2 | 3′→5′ | 16837 | 16853 |
| 2291 | ACCATAGTCACCTTTTT | NC_045512.2 | 3′→5′ | 16838 | 16854 |
| 2292 | CACCATAGTCACCTTTT | NC_045512.2 | 3′→5′ | 16839 | 16855 |
| 2293 | TCACCATAGTCACCTTT | NC_045512.2 | 3′→5′ | 16840 | 16856 |
| 2294 | ATCACCATAGTCACCTT | NC_045512.2 | 3′→5′ | 16841 | 16857 |
| 2295 | CATCACCATAGTCACCT | NC_045512.2 | 3′→5′ | 16842 | 16858 |
| 2296 | GCATCACCATAGTCACC | NC_045512.2 | 3′→5′ | 16843 | 16859 |
| 2297 | AGCATCACCATAGTCAC | NC_045512.2 | 3′→5′ | 16844 | 16860 |
| 2298 | CAGCATCACCATAGTCA | NC_045512.2 | 3′→5′ | 16845 | 16861 |
| 2299 | ACAGCATCACCATAGTC | NC_045512.2 | 3′→5′ | 16846 | 16862 |
| 2300 | AACAGCATCACCATAGT | NC_045512.2 | 3′→5′ | 16847 | 16863 |
| 2301 | CAACAGCATCACCATAG | NC_045512.2 | 3′→5′ | 16848 | 16864 |
| 2302 | ACAACAGCATCACCATA | NC_045512.2 | 3′→5′ | 16849 | 16865 |
| 2303 | TGCTCTTGTGGCACTAG | NC_045512.2 | 3′→5′ | 16954 | 16970 |
| 2304 | GTGCTCTTGTGGCACTA | NC_045512.2 | 3′→5′ | 16955 | 16971 |
| 2305 | AGTGCTCTTGTGGCACT | NC_045512.2 | 3′→5′ | 16956 | 16972 |
| 2306 | TAGTGCTCTTGTGGCAC | NC_045512.2 | 3′→5′ | 16957 | 16973 |
| 2307 | ATAGTGCTCTTGTGGCA | NC_045512.2 | 3′→5′ | 16958 | 16974 |
| 2308 | CATAGTGCTCTTGTGGC | NC_045512.2 | 3′→5′ | 16959 | 16975 |
| 2309 | ACATAGTGCTCTTGTGG | NC_045512.2 | 3′→5′ | 16960 | 16976 |
| 2310 | GAAAACTCATCTGAGAT | NC_045512.2 | 3′→5′ | 17008 | 17024 |
| 2311 | AGAAAACTCATCTGAGA | NC_045512.2 | 3′→5′ | 17009 | 17025 |
| 2312 | TAGAAAACTCATCTGAG | NC_045512.2 | 3′→5′ | 17010 | 17026 |
| 2313 | CTAGAAAACTCATCTGA | NC_045512.2 | 3′→5′ | 17011 | 17027 |
| 2314 | GCTAGAAAACTCATCTG | NC_045512.2 | 3′→5′ | 17012 | 17028 |
| 2315 | TGCTAGAAAACTCATCT | NC_045512.2 | 3′→5′ | 17013 | 17029 |
| 2316 | TTGCTAGAAAACTCATC | NC_045512.2 | 3′→5′ | 17014 | 17030 |
| 2317 | ATTGCTAGAAAACTCAT | NC_045512.2 | 3′→5′ | 17015 | 17031 |
| 2318 | CATTGCTAGAAAACTCA | NC_045512.2 | 3′→5′ | 17016 | 17032 |
| 2319 | ACATTGCTAGAAAACTC | NC_045512.2 | 3′→5′ | 17017 | 17033 |
| 2320 | AACATTGCTAGAAAACT | NC_045512.2 | 3′→5′ | 17018 | 17034 |
| 2321 | CAACATTGCTAGAAAAC | NC_045512.2 | 3′→5′ | 17019 | 17035 |
| 2322 | GCAACATTGCTAGAAAA | NC_045512.2 | 3′→5′ | 17020 | 17036 |
| 2323 | TGCAACATTGCTAGAAA | NC_045512.2 | 3′→5′ | 17021 | 17037 |
| 2324 | TTGCAACATTGCTAGAA | NC_045512.2 | 3′→5′ | 17022 | 17038 |
| 2325 | TTTGCAACATTGCTAGA | NC_045512.2 | 3′→5′ | 17023 | 17039 |
| 2326 | ATTTGCAACATTGCTAG | NC_045512.2 | 3′→5′ | 17024 | 17040 |
| 2327 | AATTTGCAACATTGCTA | NC_045512.2 | 3′→5′ | 17025 | 17041 |
| 2328 | TAATTTGCAACATTGCT | NC_045512.2 | 3′→5′ | 17026 | 17042 |
| 2329 | CCAGTACCAGGTGGTCC | NC_045512.2 | 3′→5′ | 17080 | 17096 |
| 2330 | ACCAGTACCAGGTGGTC | NC_045512.2 | 3′→5′ | 17081 | 17097 |
| 2331 | TACCAGTACCAGGTGGT | NC_045512.2 | 3′→5′ | 17082 | 17098 |
| 2332 | TTACCAGTACCAGGTGG | NC_045512.2 | 3′→5′ | 17083 | 17099 |
| 2333 | CTTACCAGTACCAGGTG | NC_045512.2 | 3′→5′ | 17084 | 17100 |
| 2334 | TCTTACCAGTACCAGGT | NC_045512.2 | 3′→5′ | 17085 | 17101 |
| 2335 | CTCTTACCAGTACCAGG | NC_045512.2 | 3′→5′ | 17086 | 17102 |
| 2336 | ACTCTTACCAGTACCAG | NC_045512.2 | 3′→5′ | 17087 | 17103 |
| 2337 | GACTCTTACCAGTACCA | NC_045512.2 | 3′→5′ | 17088 | 17104 |
| 2338 | TGACTCTTACCAGTACC | NC_045512.2 | 3′→5′ | 17089 | 17105 |
| 2339 | ATGACTCTTACCAGTAC | NC_045512.2 | 3′→5′ | 17090 | 17106 |
| 2340 | AATGACTCTTACCAGTA | NC_045512.2 | 3′→5′ | 17091 | 17107 |
| 2341 | AAATGACTCTTACCAGT | NC_045512.2 | 3′→5′ | 17092 | 17108 |
| 2342 | AAAATGACTCTTACCAG | NC_045512.2 | 3′→5′ | 17093 | 17109 |
| 2343 | CAAAATGACTCTTACCA | NC_045512.2 | 3′→5′ | 17094 | 17110 |
| 2344 | GCAAAATGACTCTTACC | NC_045512.2 | 3′→5′ | 17095 | 17111 |
| 2345 | TACACTATGCGAGCAGA | NC_045512.2 | 3′→5′ | 17137 | 17153 |
| 2346 | ATACACTATGCGAGCAG | NC_045512.2 | 3′→5′ | 17138 | 17154 |
| 2347 | TATACACTATGCGAGCA | NC_045512.2 | 3′→5′ | 17139 | 17155 |
| 2348 | GTATACACTATGCGAGC | NC_045512.2 | 3′→5′ | 17140 | 17156 |
| 2349 | GAATTCACTTTGAATTT | NC_045512.2 | 3′→5′ | 17269 | 17285 |
| 2350 | TGAATTCACTTTGAATT | NC_045512.2 | 3′→5′ | 17270 | 17286 |
| 2351 | TTGAATTCACTTTGAAT | NC_045512.2 | 3′→5′ | 17271 | 17287 |
| 2352 | GTTGAATTCACTTTGAA | NC_045512.2 | 3′→5′ | 17272 | 17288 |
| 2353 | TGTTGAATTCACTTTGA | NC_045512.2 | 3′→5′ | 17273 | 17289 |
| 2354 | GCATTGACAACACTCAA | NC_045512.2 | 3′→5′ | 17386 | 17402 |
| 2355 | AACATGTCTGGACCTAT | NC_045512.2 | 3′→5′ | 17530 | 17546 |
| 2356 | GAACATGTCTGGACCTA | NC_045512.2 | 3′→5′ | 17531 | 17547 |
| 2357 | GGAACATGTCTGGACCT | NC_045512.2 | 3′→5′ | 17532 | 17548 |
| 2358 | AGGAACATGTCTGGACC | NC_045512.2 | 3′→5′ | 17533 | 17549 |
| 2359 | ATTTCAGCAGGACAACG | NC_045512.2 | 3′→5′ | 17563 | 17579 |
| 2360 | AATTTCAGCAGGACAAC | NC_045512.2 | 3′→5′ | 17564 | 17580 |
| 2361 | CAATTTCAGCAGGACAA | NC_045512.2 | 3′→5′ | 17565 | 17581 |
| 2362 | ACAATTTCAGCAGGACA | NC_045512.2 | 3′→5′ | 17566 | 17582 |
| 2363 | GCAGATGAAACATCATG | NC_045512.2 | 3′→5′ | 17680 | 17696 |
| 2364 | TGCAGATGAAACATCAT | NC_045512.2 | 3′→5′ | 17681 | 17697 |
| 2365 | TTGCAGATGAAACATCA | NC_045512.2 | 3′→5′ | 17682 | 17698 |
| 2366 | ATTGCAGATGAAACATC | NC_045512.2 | 3′→5′ | 17683 | 17699 |
| 2367 | GCTTTTCTCCAAGCAGG | NC_045512.2 | 3′→5′ | 17746 | 17762 |
| 2368 | AGCTTTTCTCCAAGCAG | NC_045512.2 | 3′→5′ | 17747 | 17763 |
| 2369 | CAGCTTTTCTCCAAGCA | NC_045512.2 | 3′→5′ | 17748 | 17764 |
| 2370 | ACAGCTTTTCTCCAAGC | NC_045512.2 | 3′→5′ | 17749 | 17765 |
| 2371 | AATATGACATAGTCATA | NC_045512.2 | 3′→5′ | 17857 | 17873 |
| 2372 | GAATATGACATAGTCAT | NC_045512.2 | 3′→5′ | 17858 | 17874 |
| 2373 | TGAATATGACATAGTCA | NC_045512.2 | 3′→5′ | 17859 | 17875 |
| 2374 | GTGAATATGACATAGTC | NC_045512.2 | 3′→5′ | 17860 | 17876 |
| 2375 | CTATCAGACATTATGCA | NC_045512.2 | 3′→5′ | 17956 | 17972 |
| 2376 | TCTATCAGACATTATGC | NC_045512.2 | 3′→5′ | 17957 | 17973 |
| 2377 | CTCTATCAGACATTATG | NC_045512.2 | 3′→5′ | 17958 | 17974 |
| 2378 | TCTCTATCAGACATTAT | NC_045512.2 | 3′→5′ | 17959 | 17975 |
| 2379 | TGTGTAGGTGCCTGTGT | NC_045512.2 | 3′→5′ | 18100 | 18116 |
| 2380 | GTGTGTAGGTGCCTGTG | NC_045512.2 | 3′→5′ | 18101 | 18117 |
| 2381 | GGTGTGTAGGTGCCTGT | NC_045512.2 | 3′→5′ | 18102 | 18118 |
| 2382 | AGGTGTGTAGGTGCCTG | NC_045512.2 | 3′→5′ | 18103 | 18119 |
| 2383 | GAGGTGTGTAGGTGCCT | NC_045512.2 | 3′→5′ | 18104 | 18120 |
| 2384 | TGAGGTGTGTAGGTGCC | NC_045512.2 | 3′→5′ | 18105 | 18121 |
| 2385 | CTGAGGTGTGTAGGTGC | NC_045512.2 | 3′→5′ | 18106 | 18122 |
| 2386 | ATCATAGAGATGAGTCT | NC_045512.2 | 3′→5′ | 18196 | 18212 |
| 2387 | CATCATAGAGATGAGTC | NC_045512.2 | 3′→5′ | 18197 | 18213 |
| 2388 | CCATCATAGAGATGAGT | NC_045512.2 | 3′→5′ | 18198 | 18214 |
| 2389 | CCCATCATAGAGATGAG | NC_045512.2 | 3′→5′ | 18199 | 18215 |
| 2390 | ACCCATCATAGAGATGA | NC_045512.2 | 3′→5′ | 18200 | 18216 |
| 2391 | AACCCATCATAGAGATG | NC_045512.2 | 3′→5′ | 18201 | 18217 |
| 2392 | AAACCCATCATAGAGAT | NC_045512.2 | 3′→5′ | 18202 | 18218 |
| 2393 | CGCTTAACAAAGCACTC | NC_045512.2 | 3′→5′ | 18889 | 18905 |
| 2394 | ACATTTTCTAAACTCTG | NC_045512.2 | 3′→5′ | 19618 | 19634 |
| 2395 | CACATTTTCTAAACTCT | NC_045512.2 | 3′→5′ | 19619 | 19635 |
| 2396 | CCACATTTTCTAAACTC | NC_045512.2 | 3′→5′ | 19620 | 19636 |
| 2397 | GCCACATTTTCTAAACT | NC_045512.2 | 3′→5′ | 19621 | 19637 |
| 2398 | AGCCACATTTTCTAAAC | NC_045512.2 | 3′→5′ | 19622 | 19638 |
| 2399 | AAGCCACATTTTCTAAA | NC_045512.2 | 3′→5′ | 19623 | 19639 |
| 2400 | TGTCCATCAAAGTGTCC | NC_045512.2 | 3′→5′ | 19657 | 19673 |
| 2401 | TTAGCCCAAAGCTCAAA | NC_045512.2 | 3′→5′ | 19783 | 19799 |
| 2402 | CTTAGCCCAAAGCTCAA | NC_045512.2 | 3′→5′ | 19784 | 19800 |
| 2403 | GCTTAGCCCAAAGCTCA | NC_045512.2 | 3′→5′ | 19785 | 19801 |
| 2404 | CGCTTAGCCCAAAGCTC | NC_045512.2 | 3′→5′ | 19786 | 19802 |
| 2405 | CCCAAATTATTGAGTAT | NC_045512.2 | 3′→5′ | 19831 | 19847 |
| 2406 | ACCCAAATTATTGAGTA | NC_045512.2 | 3′→5′ | 19832 | 19848 |
| 2407 | CACCCAAATTATTGAGT | NC_045512.2 | 3′→5′ | 19833 | 19849 |
| 2408 | ACACCCAAATTATTGAG | NC_045512.2 | 3′→5′ | 19834 | 19850 |
| 2409 | ATTAATGTGACTCCATT | NC_045512.2 | 3′→5′ | 20107 | 20123 |
| 2410 | AATTAATGTGACTCCAT | NC_045512.2 | 3′→5′ | 20108 | 20124 |
| 2411 | CAATTAATGTGACTCCA | NC_045512.2 | 3′→5′ | 20109 | 20125 |
| 2412 | CCAATTAATGTGACTCC | NC_045512.2 | 3′→5′ | 20110 | 20126 |
| 2413 | TCCAATTAATGTGACTC | NC_045512.2 | 3′→5′ | 20111 | 20127 |
| 2414 | CTCCAATTAATGTGACT | NC_045512.2 | 3′→5′ | 20112 | 20128 |
| 2415 | TCTCCAATTAATGTGAC | NC_045512.2 | 3′→5′ | 20113 | 20129 |
| 2416 | TTCTCCAATTAATGTGA | NC_045512.2 | 3′→5′ | 20114 | 20130 |
| 2417 | GCGACATTCATCATTAT | NC_045512.2 | 3′→5′ | 20776 | 20792 |
| 2418 | TGCGACATTCATCATTA | NC_045512.2 | 3′→5′ | 20777 | 20793 |
| 2419 | TTGCGACATTCATCATT | NC_045512.2 | 3′→5′ | 20778 | 20794 |
| 2420 | TTTGCGACATTCATCAT | NC_045512.2 | 3′→5′ | 20779 | 20795 |
| 2421 | TCAGCATTCCAAGAATG | NC_045512.2 | 3′→5′ | 21178 | 21194 |
| 2422 | CCAATTAAAAATGCTTC | NC_045512.2 | 3′→5′ | 21265 | 21281 |
| 2423 | CTGTTGTTTTCTCTAAT | NC_045512.2 | 3′→5′ | 21502 | 21518 |
| 2424 | TCTGTTGTTTTCTCTAA | NC_045512.2 | 3′→5′ | 21503 | 21519 |
| 2425 | CTCTGTTGTTTTCTCTA | NC_045512.2 | 3′→5′ | 21504 | 21520 |
| 2426 | ACTCTGTTGTTTTCTCT | NC_045512.2 | 3′→5′ | 21505 | 21521 |
| 2427 | AACTCTGTTGTTTTCTC | NC_045512.2 | 3′→5′ | 21506 | 21522 |
| 2428 | CAACTCTGTTGTTTTCT | NC_045512.2 | 3′→5′ | 21507 | 21523 |
| 2429 | ACAACTCTGTTGTTTTC | NC_045512.2 | 3′→5′ | 21508 | 21524 |
| 2430 | AATATTTGTGAAAAATT | NC_045512.2 | 3′→5′ | 23963 | 23979 |
| 2431 | GCCATTTGCATAGCAAA | NC_045512.2 | 3′→5′ | 24254 | 24270 |
| 2432 | TTCTCATAGAGAACATT | NC_045512.2 | 3′→5′ | 24302 | 24318 |
| 2433 | GTTCTCATAGAGAACAT | NC_045512.2 | 3′→5′ | 24303 | 24319 |
| 2434 | GGTTCTCATAGAGAACA | NC_045512.2 | 3′→5′ | 24304 | 24320 |
| 2435 | TGGTTCTCATAGAGAAC | NC_045512.2 | 3′→5′ | 24305 | 24321 |
| 2436 | TTGGTTCTCATAGAGAA | NC_045512.2 | 3′→5′ | 24306 | 24322 |
| 2437 | TTTGGTTCTCATAGAGA | NC_045512.2 | 3′→5′ | 24307 | 24323 |
| 2438 | TTTTGGTTCTCATAGAG | NC_045512.2 | 3′→5′ | 24308 | 24324 |
| 2439 | TTTTTGGTTCTCATAGA | NC_045512.2 | 3′→5′ | 24309 | 24325 |
| 2440 | CTAAGTTGTTTAACAAG | NC_045512.2 | 3′→5′ | 24446 | 24462 |
| 2441 | GCTAAGTTGTTTAACAA | NC_045512.2 | 3′→5′ | 24447 | 24463 |
| 2442 | AGCTAAGTTGTTTAACA | NC_045512.2 | 3′→5′ | 24448 | 24464 |
| 2443 | GAGCTAAGTTGTTTAAC | NC_045512.2 | 3′→5′ | 24449 | 24465 |
| 2444 | GCAAGATTAGCAGAAGC | NC_045512.2 | 3′→5′ | 24620 | 24636 |
| 2445 | AGCAAGATTAGCAGAAG | NC_045512.2 | 3′→5′ | 24621 | 24637 |
| 2446 | CAGCAAGATTAGCAGAA | NC_045512.2 | 3′→5′ | 24622 | 24638 |
| 2447 | GCAGCAAGATTAGCAGA | NC_045512.2 | 3′→5′ | 24623 | 24639 |
| 2448 | AGCAGCAAGATTAGCAG | NC_045512.2 | 3′→5′ | 24624 | 24640 |
| 2449 | TAGCAGCAAGATTAGCA | NC_045512.2 | 3′→5′ | 24625 | 24641 |
| 2450 | GTAGCAGCAAGATTAGC | NC_045512.2 | 3′→5′ | 24626 | 24642 |
| 2451 | AGTAGCAGCAAGATTAG | NC_045512.2 | 3′→5′ | 24627 | 24643 |
| 2452 | TAGTAGCAGCAAGATTA | NC_045512.2 | 3′→5′ | 24628 | 24644 |
| 2453 | TTAGTAGCAGCAAGATT | NC_045512.2 | 3′→5′ | 24629 | 24645 |
| 2454 | TTTAGTAGCAGCAAGAT | NC_045512.2 | 3′→5′ | 24630 | 24646 |
| 2455 | TTTTAGTAGCAGCAAGA | NC_045512.2 | 3′→5′ | 24631 | 24647 |
| 2456 | ATTTTAGTAGCAGCAAG | NC_045512.2 | 3′→5′ | 24632 | 24648 |
| 2457 | CATTTTAGTAGCAGCAA | NC_045512.2 | 3′→5′ | 24633 | 24649 |
| 2458 | ACATTTTAGTAGCAGCA | NC_045512.2 | 3′→5′ | 24634 | 24650 |
| 2459 | GACATTTTAGTAGCAGC | NC_045512.2 | 3′→5′ | 24635 | 24651 |
| 2460 | CTTTTTGATTGTCCAAG | NC_045512.2 | 3′→5′ | 24662 | 24678 |
| 2461 | TCTTTTTGATTGTCCAA | NC_045512.2 | 3′→5′ | 24663 | 24679 |
| 2462 | CTCTTTTTGATTGTCCA | NC_045512.2 | 3′→5′ | 24664 | 24680 |
| 2463 | ACTCTTTTTGATTGTCC | NC_045512.2 | 3′→5′ | 24665 | 24681 |
| 2464 | AACTCTTTTTGATTGTC | NC_045512.2 | 3′→5′ | 24666 | 24682 |
| 2465 | CAACTCTTTTTGATTGT | NC_045512.2 | 3′→5′ | 24667 | 24683 |
| 2466 | TCAACTCTTTTTGATTG | NC_045512.2 | 3′→5′ | 24668 | 24684 |
| 2467 | TCTGGTGATGTATGATT | NC_045512.2 | 3′→5′ | 25034 | 25050 |
| 2468 | ATCTGGTGATGTATGAT | NC_045512.2 | 3′→5′ | 25035 | 25051 |
| 2469 | CATCTGGTGATGTATGA | NC_045512.2 | 3′→5′ | 25036 | 25052 |
| 2470 | ACATCTGGTGATGTATG | NC_045512.2 | 3′→5′ | 25037 | 25053 |
| 2471 | AACATCTGGTGATGTAT | NC_045512.2 | 3′→5′ | 25038 | 25054 |
| 2472 | CAACATCTGGTGATGTA | NC_045512.2 | 3′→5′ | 25039 | 25055 |
| 2473 | TCAACATCTGGTGATGT | NC_045512.2 | 3′→5′ | 25040 | 25056 |
| 2474 | ATCAACATCTGGTGATG | NC_045512.2 | 3′→5′ | 25041 | 25057 |
| 2475 | GAGGCGGTCAATTTCTT | NC_045512.2 | 3′→5′ | 25104 | 25120 |
| 2476 | TGAGGCGGTCAATTTCT | NC_045512.2 | 3′→5′ | 25105 | 25121 |
| 2477 | TTGAGGCGGTCAATTTC | NC_045512.2 | 3′→5′ | 25106 | 25122 |
| 2478 | ATTGAGGCGGTCAATTT | NC_045512.2 | 3′→5′ | 25107 | 25123 |
| 2479 | CATTGAGGCGGTCAATT | NC_045512.2 | 3′→5′ | 25108 | 25124 |
| 2480 | TCATTGAGGCGGTCAAT | NC_045512.2 | 3′→5′ | 25109 | 25125 |
| 2481 | CTCATTGAGGCGGTCAA | NC_045512.2 | 3′→5′ | 25110 | 25126 |
| 2482 | CCTCATTGAGGCGGTCA | NC_045512.2 | 3′→5′ | 25111 | 25127 |
| 2483 | ACCTCATTGAGGCGGTC | NC_045512.2 | 3′→5′ | 25112 | 25128 |
| 2484 | GTGTAATGTAATTTGAC | NC_045512.2 | 3′→5′ | 25364 | 25380 |
| 2485 | TGTGTAATGTAATTTGA | NC_045512.2 | 3′→5′ | 25365 | 25381 |
| 2486 | ATGTGTAATGTAATTTG | NC_045512.2 | 3′→5′ | 25366 | 25382 |
| 2487 | TATGTGTAATGTAATTT | NC_045512.2 | 3′→5′ | 25367 | 25383 |
| 2488 | TTATGTGTAATGTAATT | NC_045512.2 | 3′→5′ | 25368 | 25384 |
| 2489 | TTTATGTGTAATGTAAT | NC_045512.2 | 3′→5′ | 25369 | 25385 |
| 2490 | GTTTATGTGTAATGTAA | NC_045512.2 | 3′→5′ | 25370 | 25386 |
| 2491 | CGTTTATGTGTAATGTA | NC_045512.2 | 3′→5′ | 25371 | 25387 |
| 2492 | AGGGAGTGAGGCTTGTA | NC_045512.2 | 3′→5′ | 25502 | 25518 |
| 2493 | AAGGGAGTGAGGCTTGT | NC_045512.2 | 3′→5′ | 25503 | 25519 |
| 2494 | AAAGGGAGTGAGGCTTG | NC_045512.2 | 3′→5′ | 25504 | 25520 |
| 2495 | GAAAGGGAGTGAGGCTT | NC_045512.2 | 3′→5′ | 25505 | 25521 |
| 2496 | CGAAAGGGAGTGAGGCT | NC_045512.2 | 3′→5′ | 25506 | 25522 |
| 2497 | CCGAAAGGGAGTGAGGC | NC_045512.2 | 3′→5′ | 25507 | 25523 |
| 2498 | TCCGAAAGGGAGTGAGG | NC_045512.2 | 3′→5′ | 25508 | 25524 |
| 2499 | ATCCGAAAGGGAGTGAG | NC_045512.2 | 3′→5′ | 25509 | 25525 |
| 2500 | CATCCGAAAGGGAGTGA | NC_045512.2 | 3′→5′ | 25510 | 25526 |
| 2501 | CCATCCGAAAGGGAGTG | NC_045512.2 | 3′→5′ | 25511 | 25527 |
| 2502 | GCCATCCGAAAGGGAGT | NC_045512.2 | 3′→5′ | 25512 | 25528 |
| 2503 | AGCCATCCGAAAGGGAG | NC_045512.2 | 3′→5′ | 25513 | 25529 |
| 2504 | AAGCCATCCGAAAGGGA | NC_045512.2 | 3′→5′ | 25514 | 25530 |
| 2505 | CTAGTAGTCGTCGTCGG | NC_045512.2 | 3′→5′ | 26191 | 26207 |
| 2506 | GCTAGTAGTCGTCGTCG | NC_045512.2 | 3′→5′ | 26192 | 26208 |
| 2507 | CGCTAGTAGTCGTCGTC | NC_045512.2 | 3′→5′ | 26193 | 26209 |
| 2508 | ACGCTAGTAGTCGTCGT | NC_045512.2 | 3′→5′ | 26194 | 26210 |
| 2509 | CACGCTAGTAGTCGTCG | NC_045512.2 | 3′→5′ | 26195 | 26211 |
| 2510 | GCACGCTAGTAGTCGTC | NC_045512.2 | 3′→5′ | 26196 | 26212 |
| 2511 | GGCACGCTAGTAGTCGT | NC_045512.2 | 3′→5′ | 26197 | 26213 |
| 2512 | AGGCACGCTAGTAGTCG | NC_045512.2 | 3′→5′ | 26198 | 26214 |
| 2513 | AAGGCACGCTAGTAGTC | NC_045512.2 | 3′→5′ | 26199 | 26215 |
| 2514 | AAAGGCACGCTAGTAGT | NC_045512.2 | 3′→5′ | 26200 | 26216 |
| 2515 | CAAAGGCACGCTAGTAG | NC_045512.2 | 3′→5′ | 26201 | 26217 |
| 2516 | ACAAAGGCACGCTAGTA | NC_045512.2 | 3′→5′ | 26202 | 26218 |
| 2517 | TACAAAGGCACGCTAGT | NC_045512.2 | 3′→5′ | 26203 | 26219 |
| 2518 | TTACAAAGGCACGCTAG | NC_045512.2 | 3′→5′ | 26204 | 26220 |
| 2519 | CTTACAAAGGCACGCTA | NC_045512.2 | 3′→5′ | 26205 | 26221 |
| 2520 | GCTTACAAAGGCACGCT | NC_045512.2 | 3′→5′ | 26206 | 26222 |
| 2521 | TGCTTACAAAGGCACGC | NC_045512.2 | 3′→5′ | 26207 | 26223 |
| 2522 | GTGCTTACAAAGGCACG | NC_045512.2 | 3′→5′ | 26208 | 26224 |
| 2523 | TGTGCTTACAAAGGCAC | NC_045512.2 | 3′→5′ | 26209 | 26225 |
| 2524 | TTGTGCTTACAAAGGCA | NC_045512.2 | 3′→5′ | 26210 | 26226 |
| 2525 | CTTGTGCTTACAAAGGC | NC_045512.2 | 3′→5′ | 26211 | 26227 |
| 2526 | ACATAAGTTCGTACTCA | NC_045512.2 | 3′→5′ | 26232 | 26248 |
| 2527 | TACATAAGTTCGTACTC | NC_045512.2 | 3′→5′ | 26233 | 26249 |
| 2528 | GTACATAAGTTCGTACT | NC_045512.2 | 3′→5′ | 26234 | 26250 |
| 2529 | AGTACATAAGTTCGTAC | NC_045512.2 | 3′→5′ | 26235 | 26251 |
| 2530 | GAGTACATAAGTTCGTA | NC_045512.2 | 3′→5′ | 26236 | 26252 |
| 2531 | TGAGTACATAAGTTCGT | NC_045512.2 | 3′→5′ | 26237 | 26253 |
| 2532 | ATGAGTACATAAGTTCG | NC_045512.2 | 3′→5′ | 26238 | 26254 |
| 2533 | AATGAGTACATAAGTTC | NC_045512.2 | 3′→5′ | 26239 | 26255 |
| 2534 | GAATGAGTACATAAGTT | NC_045512.2 | 3′→5′ | 26240 | 26256 |
| 2535 | CGAATGAGTACATAAGT | NC_045512.2 | 3′→5′ | 26241 | 26257 |
| 2536 | ACGAATGAGTACATAAG | NC_045512.2 | 3′→5′ | 26242 | 26258 |
| 2537 | AACGAATGAGTACATAA | NC_045512.2 | 3′→5′ | 26243 | 26259 |
| 2538 | AAACGAATGAGTACATA | NC_045512.2 | 3′→5′ | 26244 | 26260 |
| 2539 | GAAACGAATGAGTACAT | NC_045512.2 | 3′→5′ | 26245 | 26261 |
| 2540 | CGAAACGAATGAGTACA | NC_045512.2 | 3′→5′ | 26246 | 26262 |
| 2541 | CCGAAACGAATGAGTAC | NC_045512.2 | 3′→5′ | 26247 | 26263 |
| 2542 | TCCGAAACGAATGAGTA | NC_045512.2 | 3′→5′ | 26248 | 26264 |
| 2543 | TTCCGAAACGAATGAGT | NC_045512.2 | 3′→5′ | 26249 | 26265 |
| 2544 | CTTCCGAAACGAATGAG | NC_045512.2 | 3′→5′ | 26250 | 26266 |
| 2545 | TCTTCCGAAACGAATGA | NC_045512.2 | 3′→5′ | 26251 | 26267 |
| 2546 | ACTATTAACGTACCTGT | NC_045512.2 | 3′→5′ | 26269 | 26285 |
| 2547 | AACTATTAACGTACCTG | NC_045512.2 | 3′→5′ | 26270 | 26286 |
| 2548 | TAACTATTAACGTACCT | NC_045512.2 | 3′→5′ | 26271 | 26287 |
| 2549 | TTAACTATTAACGTACC | NC_045512.2 | 3′→5′ | 26272 | 26288 |
| 2550 | ATTAACTATTAACGTAC | NC_045512.2 | 3′→5′ | 26273 | 26289 |
| 2551 | TATTAACTATTAACGTA | NC_045512.2 | 3′→5′ | 26274 | 26290 |
| 2552 | CTATTAACTATTAACGT | NC_045512.2 | 3′→5′ | 26275 | 26291 |
| 2553 | GCTATTAACTATTAACG | NC_045512.2 | 3′→5′ | 26276 | 26292 |
| 2554 | CGCTATTAACTATTAAC | NC_045512.2 | 3′→5′ | 26277 | 26293 |
| 2555 | ACGCTATTAACTATTAA | NC_045512.2 | 3′→5′ | 26278 | 26294 |
| 2556 | TACGCTATTAACTATTA | NC_045512.2 | 3′→5′ | 26279 | 26295 |
| 2557 | GTACGCTATTAACTATT | NC_045512.2 | 3′→5′ | 26280 | 26296 |
| 2558 | AGTACGCTATTAACTAT | NC_045512.2 | 3′→5′ | 26281 | 26297 |
| 2559 | AAGTACGCTATTAACTA | NC_045512.2 | 3′→5′ | 26282 | 26298 |
| 2560 | GAAGTACGCTATTAACT | NC_045512.2 | 3′→5′ | 26283 | 26299 |
| 2561 | AGAAGTACGCTATTAAC | NC_045512.2 | 3′→5′ | 26284 | 26300 |
| 2562 | AAGAAGTACGCTATTAA | NC_045512.2 | 3′→5′ | 26285 | 26301 |
| 2563 | AAAGAAGTACGCTATTA | NC_045512.2 | 3′→5′ | 26286 | 26302 |
| 2564 | AAAAGAAGTACGCTATT | NC_045512.2 | 3′→5′ | 26287 | 26303 |
| 2565 | AAAAAGAAGTACGCTAT | NC_045512.2 | 3′→5′ | 26288 | 26304 |
| 2566 | GAAAAAGAAGTACGCTA | NC_045512.2 | 3′→5′ | 26289 | 26305 |
| 2567 | AGAAAAAGAAGTACGCT | NC_045512.2 | 3′→5′ | 26290 | 26306 |
| 2568 | AAGAAAAAGAAGTACGC | NC_045512.2 | 3′→5′ | 26291 | 26307 |
| 2569 | CAAGAAAAAGAAGTACG | NC_045512.2 | 3′→5′ | 26292 | 26308 |
| 2570 | GCAAGAAAAAGAAGTAC | NC_045512.2 | 3′→5′ | 26293 | 26309 |
| 2571 | AGCAAGAAAAAGAAGTA | NC_045512.2 | 3′→5′ | 26294 | 26310 |
| 2572 | AAGCAAGAAAAAGAAGT | NC_045512.2 | 3′→5′ | 26295 | 26311 |
| 2573 | AAAGCAAGAAAAAGAAG | NC_045512.2 | 3′→5′ | 26296 | 26312 |
| 2574 | GAAAGCAAGAAAAAGAA | NC_045512.2 | 3′→5′ | 26297 | 26313 |
| 2575 | CGAAAGCAAGAAAAAGA | NC_045512.2 | 3′→5′ | 26298 | 26314 |
| 2576 | ACGAAAGCAAGAAAAAG | NC_045512.2 | 3′→5′ | 26299 | 26315 |
| 2577 | CACGAAAGCAAGAAAAA | NC_045512.2 | 3′→5′ | 26300 | 26316 |
| 2578 | CCACGAAAGCAAGAAAA | NC_045512.2 | 3′→5′ | 26301 | 26317 |
| 2579 | ACCACGAAAGCAAGAAA | NC_045512.2 | 3′→5′ | 26302 | 26318 |
| 2580 | TACCACGAAAGCAAGAA | NC_045512.2 | 3′→5′ | 26303 | 26319 |
| 2581 | ATACCACGAAAGCAAGA | NC_045512.2 | 3′→5′ | 26304 | 26320 |
| 2582 | AATACCACGAAAGCAAG | NC_045512.2 | 3′→5′ | 26305 | 26321 |
| 2583 | GAATACCACGAAAGCAA | NC_045512.2 | 3′→5′ | 26306 | 26322 |
| 2584 | AGAATACCACGAAAGCA | NC_045512.2 | 3′→5′ | 26307 | 26323 |
| 2585 | AAGAATACCACGAAAGC | NC_045512.2 | 3′→5′ | 26308 | 26324 |
| 2586 | CAAGAATACCACGAAAG | NC_045512.2 | 3′→5′ | 26309 | 26325 |
| 2587 | GCAAGAATACCACGAAA | NC_045512.2 | 3′→5′ | 26310 | 26326 |
| 2588 | AGCAAGAATACCACGAA | NC_045512.2 | 3′→5′ | 26311 | 26327 |
| 2589 | TAGCAAGAATACCACGA | NC_045512.2 | 3′→5′ | 26312 | 26328 |
| 2590 | CTAGCAAGAATACCACG | NC_045512.2 | 3′→5′ | 26313 | 26329 |
| 2591 | ACTAGCAAGAATACCAC | NC_045512.2 | 3′→5′ | 26314 | 26330 |
| 2592 | GTAAGGATGGCTAGTGT | NC_045512.2 | 3′→5′ | 26332 | 26348 |
| 2593 | AGTAAGGATGGCTAGTG | NC_045512.2 | 3′→5′ | 26333 | 26349 |
| 2594 | CAGTAAGGATGGCTAGT | NC_045512.2 | 3′→5′ | 26334 | 26350 |
| 2595 | GCAGTAAGGATGGCTAG | NC_045512.2 | 3′→5′ | 26335 | 26351 |
| 2596 | CGCAGTAAGGATGGCTA | NC_045512.2 | 3′→5′ | 26336 | 26352 |
| 2597 | GCGCAGTAAGGATGGCT | NC_045512.2 | 3′→5′ | 26337 | 26353 |
| 2598 | AGCGCAGTAAGGATGGC | NC_045512.2 | 3′→5′ | 26338 | 26354 |
| 2599 | AAGCGCAGTAAGGATGG | NC_045512.2 | 3′→5′ | 26339 | 26355 |
| 2600 | GAAGCGCAGTAAGGATG | NC_045512.2 | 3′→5′ | 26340 | 26356 |
| 2601 | CGAAGCGCAGTAAGGAT | NC_045512.2 | 3′→5′ | 26341 | 26357 |
| 2602 | TCGAAGCGCAGTAAGGA | NC_045512.2 | 3′→5′ | 26342 | 26358 |
| 2603 | ATCGAAGCGCAGTAAGG | NC_045512.2 | 3′→5′ | 26343 | 26359 |
| 2604 | AATCGAAGCGCAGTAAG | NC_045512.2 | 3′→5′ | 26344 | 26360 |
| 2605 | CAATCGAAGCGCAGTAA | NC_045512.2 | 3′→5′ | 26345 | 26361 |
| 2606 | ACAATCGAAGCGCAGTA | NC_045512.2 | 3′→5′ | 26346 | 26362 |
| 2607 | CACAATCGAAGCGCAGT | NC_045512.2 | 3′→5′ | 26347 | 26363 |
| 2608 | ACACAATCGAAGCGCAG | NC_045512.2 | 3′→5′ | 26348 | 26364 |
| 2609 | CACACAATCGAAGCGCA | NC_045512.2 | 3′→5′ | 26349 | 26365 |
| 2610 | GCACACAATCGAAGCGC | NC_045512.2 | 3′→5′ | 26350 | 26366 |
| 2611 | CGCACACAATCGAAGCG | NC_045512.2 | 3′→5′ | 26351 | 26367 |
| 2612 | ACGCACACAATCGAAGC | NC_045512.2 | 3′→5′ | 26352 | 26368 |
| 2613 | TACGCACACAATCGAAG | NC_045512.2 | 3′→5′ | 26353 | 26369 |
| 2614 | GTACGCACACAATCGAA | NC_045512.2 | 3′→5′ | 26354 | 26370 |
| 2615 | AGTACGCACACAATCGA | NC_045512.2 | 3′→5′ | 26355 | 26371 |
| 2616 | CAGTACGCACACAATCG | NC_045512.2 | 3′→5′ | 26356 | 26372 |
| 2617 | GCAGTACGCACACAATC | NC_045512.2 | 3′→5′ | 26357 | 26373 |
| 2618 | AGCAGTACGCACACAAT | NC_045512.2 | 3′→5′ | 26358 | 26374 |
| 2619 | CAGCAGTACGCACACAA | NC_045512.2 | 3′→5′ | 26359 | 26375 |
| 2620 | GCAGCAGTACGCACACA | NC_045512.2 | 3′→5′ | 26360 | 26376 |
| 2621 | TGCAGCAGTACGCACAC | NC_045512.2 | 3′→5′ | 26361 | 26377 |
| 2622 | TTGCAGCAGTACGCACA | NC_045512.2 | 3′→5′ | 26362 | 26378 |
| 2623 | ATTGCAGCAGTACGCAC | NC_045512.2 | 3′→5′ | 26363 | 26379 |
| 2624 | TATTGCAGCAGTACGCA | NC_045512.2 | 3′→5′ | 26364 | 26380 |
| 2625 | ATATTGCAGCAGTACGC | NC_045512.2 | 3′→5′ | 26365 | 26381 |
| 2626 | AATATTGCAGCAGTACG | NC_045512.2 | 3′→5′ | 26366 | 26382 |
| 2627 | CAATATTGCAGCAGTAC | NC_045512.2 | 3′→5′ | 26367 | 26383 |
| 2628 | ACAATATTGCAGCAGTA | NC_045512.2 | 3′→5′ | 26368 | 26384 |
| 2629 | AACAATATTGCAGCAGT | NC_045512.2 | 3′→5′ | 26369 | 26385 |
| 2630 | TAACAATATTGCAGCAG | NC_045512.2 | 3′→5′ | 26370 | 26386 |
| 2631 | TTAACAATATTGCAGCA | NC_045512.2 | 3′→5′ | 26371 | 26387 |
| 2632 | GTTAACAATATTGCAGC | NC_045512.2 | 3′→5′ | 26372 | 26388 |
| 2633 | CGTTAACAATATTGCAG | NC_045512.2 | 3′→5′ | 26373 | 26389 |
| 2634 | ACGTTAACAATATTGCA | NC_045512.2 | 3′→5′ | 26374 | 26390 |
| 2635 | CACGTTAACAATATTGC | NC_045512.2 | 3′→5′ | 26375 | 26391 |
| 2636 | TCACGTTAACAATATTG | NC_045512.2 | 3′→5′ | 26376 | 26392 |
| 2637 | CTCACGTTAACAATATT | NC_045512.2 | 3′→5′ | 26377 | 26393 |
| 2638 | ACTCACGTTAACAATAT | NC_045512.2 | 3′→5′ | 26378 | 26394 |
| 2639 | TTCAGATTTTTAACACG | NC_045512.2 | 3′→5′ | 26425 | 26441 |
| 2640 | CAGAAGATCAGGAACTC | NC_045512.2 | 3′→5′ | 26450 | 26466 |
| 2641 | CCAGAAGATCAGGAACT | NC_045512.2 | 3′→5′ | 26451 | 26467 |
| 2642 | ACCAGAAGATCAGGAAC | NC_045512.2 | 3′→5′ | 26452 | 26468 |
| 2643 | GACCAGAAGATCAGGAA | NC_045512.2 | 3′→5′ | 26453 | 26469 |
| 2644 | AGACCAGAAGATCAGGA | NC_045512.2 | 3′→5′ | 26454 | 26470 |
| 2645 | TAGACCAGAAGATCAGG | NC_045512.2 | 3′→5′ | 26455 | 26471 |
| 2646 | TTAGACCAGAAGATCAG | NC_045512.2 | 3′→5′ | 26456 | 26472 |
| 2647 | TTTAGACCAGAAGATCA | NC_045512.2 | 3′→5′ | 26457 | 26473 |
| 2648 | GTTTAGACCAGAAGATC | NC_045512.2 | 3′→5′ | 26458 | 26474 |
| 2649 | CGTTTAGACCAGAAGAT | NC_045512.2 | 3′→5′ | 26459 | 26475 |
| 2650 | TCGTTTAGACCAGAAGA | NC_045512.2 | 3′→5′ | 26460 | 26476 |
| 2651 | TTCGTTTAGACCAGAAG | NC_045512.2 | 3′→5′ | 26461 | 26477 |
| 2652 | GTTCGTTTAGACCAGAA | NC_045512.2 | 3′→5′ | 26462 | 26478 |
| 2653 | AGTTCGTTTAGACCAGA | NC_045512.2 | 3′→5′ | 26463 | 26479 |
| 2654 | TAGTTCGTTTAGACCAG | NC_045512.2 | 3′→5′ | 26464 | 26480 |
| 2655 | TTAGTTCGTTTAGACCA | NC_045512.2 | 3′→5′ | 26465 | 26481 |
| 2656 | TAAAGTTCCAAACAGAA | NC_045512.2 | 3′→5′ | 26497 | 26513 |
| 2657 | TTAAAGTTCCAAACAGA | NC_045512.2 | 3′→5′ | 26498 | 26514 |
| 2658 | ACTAGGTTCCATTGTTC | NC_045512.2 | 3′→5′ | 26574 | 26590 |
| 2659 | TACTAGGTTCCATTGTT | NC_045512.2 | 3′→5′ | 26575 | 26591 |
| 2660 | TTACTAGGTTCCATTGT | NC_045512.2 | 3′→5′ | 26576 | 26592 |
| 2661 | ATTACTAGGTTCCATTG | NC_045512.2 | 3′→5′ | 26577 | 26593 |
| 2662 | TATTACTAGGTTCCATT | NC_045512.2 | 3′→5′ | 26578 | 26594 |
| 2663 | CTATTACTAGGTTCCAT | NC_045512.2 | 3′→5′ | 26579 | 26595 |
| 2664 | CCTATTACTAGGTTCCA | NC_045512.2 | 3′→5′ | 26580 | 26596 |
| 2665 | ACCTATTACTAGGTTCC | NC_045512.2 | 3′→5′ | 26581 | 26597 |
| 2666 | AACCTATTACTAGGTTC | NC_045512.2 | 3′→5′ | 26582 | 26598 |
| 2667 | AAACCTATTACTAGGTT | NC_045512.2 | 3′→5′ | 26583 | 26599 |
| 2668 | GAAACCTATTACTAGGT | NC_045512.2 | 3′→5′ | 26584 | 26600 |
| 2669 | ACAGCAGCAAGCACAAA | NC_045512.2 | 3′→5′ | 26715 | 26731 |
| 2670 | AGCCACATCAAGCCTAC | NC_045512.2 | 3′→5′ | 26784 | 26800 |
| 2671 | AGCGTTCGTGATGTAGC | NC_045512.2 | 3′→5′ | 27033 | 27049 |
| 2672 | AAGCGTTCGTGATGTAG | NC_045512.2 | 3′→5′ | 27034 | 27050 |
| 2673 | AAAGCGTTCGTGATGTA | NC_045512.2 | 3′→5′ | 27035 | 27051 |
| 2674 | GAAAGCGTTCGTGATGT | NC_045512.2 | 3′→5′ | 27036 | 27052 |
| 2675 | AGAAAGCGTTCGTGATG | NC_045512.2 | 3′→5′ | 27037 | 27053 |
| 2676 | AAGAAAGCGTTCGTGAT | NC_045512.2 | 3′→5′ | 27038 | 27054 |
| 2677 | TAAGAAAGCGTTCGTGA | NC_045512.2 | 3′→5′ | 27039 | 27055 |
| 2678 | ATAAGAAAGCGTTCGTG | NC_045512.2 | 3′→5′ | 27040 | 27056 |
| 2679 | AATAAGAAAGCGTTCGT | NC_045512.2 | 3′→5′ | 27041 | 27057 |
| 2680 | TAATAAGAAAGCGTTCG | NC_045512.2 | 3′→5′ | 27042 | 27058 |
| 2681 | GTAATAAGAAAGCGTTC | NC_045512.2 | 3′→5′ | 27043 | 27059 |
| 2682 | TGTAATAAGAAAGCGTT | NC_045512.2 | 3′→5′ | 27044 | 27060 |
| 2683 | TTGTAATAAGAAAGCGT | NC_045512.2 | 3′→5′ | 27045 | 27061 |
| 2684 | TTTGTAATAAGAAAGCG | NC_045512.2 | 3′→5′ | 27046 | 27062 |
| 2685 | ATTTGTAATAAGAAAGC | NC_045512.2 | 3′→5′ | 27047 | 27063 |
| 2686 | AATTTGTAATAAGAAAG | NC_045512.2 | 3′→5′ | 27048 | 27064 |
| 2687 | TATGCAGCAAAACCTGA | NC_045512.2 | 3′→5′ | 27093 | 27109 |
| 2688 | GTATGCAGCAAAACCTG | NC_045512.2 | 3′→5′ | 27094 | 27110 |
| 2689 | TGTATGCAGCAAAACCT | NC_045512.2 | 3′→5′ | 27095 | 27111 |
| 2690 | AGCAAAGCAATATTGTC | NC_045512.2 | 3′→5′ | 27165 | 27181 |
| 2691 | GTTGTCACTTACTGTAC | NC_045512.2 | 3′→5′ | 27183 | 27199 |
| 2692 | TGTTGTCACTTACTGTA | NC_045512.2 | 3′→5′ | 27184 | 27200 |
| 2693 | CTGTTGTCACTTACTGT | NC_045512.2 | 3′→5′ | 27185 | 27201 |
| 2694 | TCTGTTGTCACTTACTG | NC_045512.2 | 3′→5′ | 27186 | 27202 |
| 2695 | ATCTGTTGTCACTTACT | NC_045512.2 | 3′→5′ | 27187 | 27203 |
| 2696 | CATCTGTTGTCACTTAC | NC_045512.2 | 3′→5′ | 27188 | 27204 |
| 2697 | ACATCTGTTGTCACTTA | NC_045512.2 | 3′→5′ | 27189 | 27205 |
| 2698 | AACATCTGTTGTCACTT | NC_045512.2 | 3′→5′ | 27190 | 27206 |
| 2699 | AAACATCTGTTGTCACT | NC_045512.2 | 3′→5′ | 27191 | 27207 |
| 2700 | GAAACATCTGTTGTCAC | NC_045512.2 | 3′→5′ | 27192 | 27208 |
| 2701 | TGAAACATCTGTTGTCA | NC_045512.2 | 3′→5′ | 27193 | 27209 |
| 2702 | ATGAAACATCTGTTGTC | NC_045512.2 | 3′→5′ | 27194 | 27210 |
| 2703 | GATGAAACATCTGTTGT | NC_045512.2 | 3′→5′ | 27195 | 27211 |
| 2704 | AGATGAAACATCTGTTG | NC_045512.2 | 3′→5′ | 27196 | 27212 |
| 2705 | TTCATGTTCGTTTAATC | NC_045512.2 | 3′→5′ | 27382 | 27398 |
| 2706 | TTTCATGTTCGTTTAAT | NC_045512.2 | 3′→5′ | 27383 | 27399 |
| 2707 | TTTTCATGTTCGTTTAA | NC_045512.2 | 3′→5′ | 27384 | 27400 |
| 2708 | ATTTTCATGTTCGTTTA | NC_045512.2 | 3′→5′ | 27385 | 27401 |
| 2709 | AATTTTCATGTTCGTTT | NC_045512.2 | 3′→5′ | 27386 | 27402 |
| 2710 | TAATTTTCATGTTCGTT | NC_045512.2 | 3′→5′ | 27387 | 27403 |
| 2711 | ATAATTTTCATGTTCGT | NC_045512.2 | 3′→5′ | 27388 | 27404 |
| 2712 | AATAATTTTCATGTTCG | NC_045512.2 | 3′→5′ | 27389 | 27405 |
| 2713 | GAATAATTTTCATGTTC | NC_045512.2 | 3′→5′ | 27390 | 27406 |
| 2714 | AGAATAATTTTCATGTT | NC_045512.2 | 3′→5′ | 27391 | 27407 |
| 2715 | GTACCTCTAACACACTC | NC_045512.2 | 3′→5′ | 27457 | 27473 |
| 2716 | GGTGAATTGCCCTCGTA | NC_045512.2 | 3′→5′ | 27511 | 27527 |
| 2717 | TGGTGAATTGCCCTCGT | NC_045512.2 | 3′→5′ | 27512 | 27528 |
| 2718 | ATGGTGAATTGCCCTCG | NC_045512.2 | 3′→5′ | 27513 | 27529 |
| 2719 | AATGGTGAATTGCCCTC | NC_045512.2 | 3′→5′ | 27514 | 27530 |
| 2720 | AAATGGTGAATTGCCCT | NC_045512.2 | 3′→5′ | 27515 | 27531 |
| 2721 | GAAATGGTGAATTGCCC | NC_045512.2 | 3′→5′ | 27516 | 27532 |
| 2722 | TGAAATGGTGAATTGCC | NC_045512.2 | 3′→5′ | 27517 | 27533 |
| 2723 | TCCTCTTGTCTGATGAA | NC_045512.2 | 3′→5′ | 27652 | 27668 |
| 2724 | AAATAGAAGTCAATTAA | NC_045512.2 | 3′→5′ | 27771 | 27787 |
| 2725 | CAAATAGAAGTCAATTA | NC_045512.2 | 3′→5′ | 27772 | 27788 |
| 2726 | ACAAATAGAAGTCAATT | NC_045512.2 | 3′→5′ | 27773 | 27789 |
| 2727 | CACAAATAGAAGTCAAT | NC_045512.2 | 3′→5′ | 27774 | 27790 |
| 2728 | GCACAAATAGAAGTCAA | NC_045512.2 | 3′→5′ | 27775 | 27791 |
| 2729 | AGCACAAATAGAAGTCA | NC_045512.2 | 3′→5′ | 27776 | 27792 |
| 2730 | AAGCACAAATAGAAGTC | NC_045512.2 | 3′→5′ | 27777 | 27793 |
| 2731 | AAAGCACAAATAGAAGT | NC_045512.2 | 3′→5′ | 27778 | 27794 |
| 2732 | AAAAGCACAAATAGAAG | NC_045512.2 | 3′→5′ | 27779 | 27795 |
| 2733 | AAAAAGCACAAATAGAA | NC_045512.2 | 3′→5′ | 27780 | 27796 |
| 2734 | TAAAAAGCACAAATAGA | NC_045512.2 | 3′→5′ | 27781 | 27797 |
| 2735 | CTAAAAAGCACAAATAG | NC_045512.2 | 3′→5′ | 27782 | 27798 |
| 2736 | GCTAAAAAGCACAAATA | NC_045512.2 | 3′→5′ | 27783 | 27799 |
| 2737 | GGCTAAAAAGCACAAAT | NC_045512.2 | 3′→5′ | 27784 | 27800 |
| 2738 | AGGCTAAAAAGCACAAA | NC_045512.2 | 3′→5′ | 27785 | 27801 |
| 2739 | AAGGCTAAAAAGCACAA | NC_045512.2 | 3′→5′ | 27786 | 27802 |
| 2740 | AAAGGCTAAAAAGCACA | NC_045512.2 | 3′→5′ | 27787 | 27803 |
| 2741 | GAAAGGCTAAAAAGCAC | NC_045512.2 | 3′→5′ | 27788 | 27804 |
| 2742 | AGAAAGGCTAAAAAGCA | NC_045512.2 | 3′→5′ | 27789 | 27805 |
| 2743 | CAGAAAGGCTAAAAAGC | NC_045512.2 | 3′→5′ | 27790 | 27806 |
| 2744 | GCAGAAAGGCTAAAAAG | NC_045512.2 | 3′→5′ | 27791 | 27807 |
| 2745 | AGCAGAAAGGCTAAAAA | NC_045512.2 | 3′→5′ | 27792 | 27808 |
| 2746 | TAGCAGAAAGGCTAAAA | NC_045512.2 | 3′→5′ | 27793 | 27809 |
| 2747 | ATAGCAGAAAGGCTAAA | NC_045512.2 | 3′→5′ | 27794 | 27810 |
| 2748 | AATAGCAGAAAGGCTAA | NC_045512.2 | 3′→5′ | 27795 | 27811 |
| 2749 | GAATAGCAGAAAGGCTA | NC_045512.2 | 3′→5′ | 27796 | 27812 |
| 2750 | GGAATAGCAGAAAGGCT | NC_045512.2 | 3′→5′ | 27797 | 27813 |
| 2751 | AGGAATAGCAGAAAGGC | NC_045512.2 | 3′→5′ | 27798 | 27814 |
| 2752 | AAGGAATAGCAGAAAGG | NC_045512.2 | 3′→5′ | 27799 | 27815 |
| 2753 | CAAGGAATAGCAGAAAG | NC_045512.2 | 3′→5′ | 27800 | 27816 |
| 2754 | ACAAGGAATAGCAGAAA | NC_045512.2 | 3′→5′ | 27801 | 27817 |
| 2755 | AACAAGGAATAGCAGAA | NC_045512.2 | 3′→5′ | 27802 | 27818 |
| 2756 | CATTATCAGACATTTTA | NC_045512.2 | 3′→5′ | 28270 | 28286 |
| 2757 | CCATTATCAGACATTTT | NC_045512.2 | 3′→5′ | 28271 | 28287 |
| 2758 | TCCATTATCAGACATTT | NC_045512.2 | 3′→5′ | 28272 | 28288 |
| 2759 | GTCCATTATCAGACATT | NC_045512.2 | 3′→5′ | 28273 | 28289 |
| 2760 | GGTCCATTATCAGACAT | NC_045512.2 | 3′→5′ | 28274 | 28290 |
| 2761 | GGGTCCATTATCAGACA | NC_045512.2 | 3′→5′ | 28275 | 28291 |
| 2762 | GGGGTCCATTATCAGAC | NC_045512.2 | 3′→5′ | 28276 | 28292 |
| 2763 | TGGGGTCCATTATCAGA | NC_045512.2 | 3′→5′ | 28277 | 28293 |
| 2764 | TTGGGGTCCATTATCAG | NC_045512.2 | 3′→5′ | 28278 | 28294 |
| 2765 | TTTGGGGTCCATTATCA | NC_045512.2 | 3′→5′ | 28279 | 28295 |
| 2766 | TTTTGGGGTCCATTATC | NC_045512.2 | 3′→5′ | 28280 | 28296 |
| 2767 | TTGGGTAAACCTTGGGG | NC_045512.2 | 3′→5′ | 28397 | 28413 |
| 2768 | ATTGGGTAAACCTTGGG | NC_045512.2 | 3′→5′ | 28398 | 28414 |
| 2769 | TATTGGGTAAACCTTGG | NC_045512.2 | 3′→5′ | 28399 | 28415 |
| 2770 | TTATTGGGTAAACCTTG | NC_045512.2 | 3′→5′ | 28400 | 28416 |
| 2771 | ATTATTGGGTAAACCTT | NC_045512.2 | 3′→5′ | 28401 | 28417 |
| 2772 | TATTATTGGGTAAACCT | NC_045512.2 | 3′→5′ | 28402 | 28418 |
| 2773 | GTATTATTGGGTAAACC | NC_045512.2 | 3′→5′ | 28403 | 28419 |
| 2774 | AGTATTATTGGGTAAAC | NC_045512.2 | 3′→5′ | 28404 | 28420 |
| 2775 | CAGTATTATTGGGTAAA | NC_045512.2 | 3′→5′ | 28405 | 28421 |
| 2776 | GCAGTATTATTGGGTAA | NC_045512.2 | 3′→5′ | 28406 | 28422 |
| 2777 | CGCAGTATTATTGGGTA | NC_045512.2 | 3′→5′ | 28407 | 28423 |
| 2778 | ACGCAGTATTATTGGGT | NC_045512.2 | 3′→5′ | 28408 | 28424 |
| 2779 | GACGCAGTATTATTGGG | NC_045512.2 | 3′→5′ | 28409 | 28425 |
| 2780 | AGACGCAGTATTATTGG | NC_045512.2 | 3′→5′ | 28410 | 28426 |
| 2781 | AAGACGCAGTATTATTG | NC_045512.2 | 3′→5′ | 28411 | 28427 |
| 2782 | CAAGACGCAGTATTATT | NC_045512.2 | 3′→5′ | 28412 | 28428 |
| 2783 | CCAAGACGCAGTATTAT | NC_045512.2 | 3′→5′ | 28413 | 28429 |
| 2784 | ACCAAGACGCAGTATTA | NC_045512.2 | 3′→5′ | 28414 | 28430 |
| 2785 | AACCAAGACGCAGTATT | NC_045512.2 | 3′→5′ | 28415 | 28431 |
| 2786 | GAACCAAGACGCAGTAT | NC_045512.2 | 3′→5′ | 28416 | 28432 |
| 2787 | TGAACCAAGACGCAGTA | NC_045512.2 | 3′→5′ | 28417 | 28433 |
| 2788 | GTGAACCAAGACGCAGT | NC_045512.2 | 3′→5′ | 28418 | 28434 |
| 2789 | AGCCAATTTGGTCATCT | NC_045512.2 | 3′→5′ | 28513 | 28529 |
| 2790 | TAGCCAATTTGGTCATC | NC_045512.2 | 3′→5′ | 28514 | 28530 |
| 2791 | GTAGCCAATTTGGTCAT | NC_045512.2 | 3′→5′ | 28515 | 28531 |
| 2792 | AGTAGCCAATTTGGTCA | NC_045512.2 | 3′→5′ | 28516 | 28532 |
| 2793 | TAGTAGCCAATTTGGTC | NC_045512.2 | 3′→5′ | 28517 | 28533 |
| 2794 | GTAGTAGCCAATTTGGT | NC_045512.2 | 3′→5′ | 28518 | 28534 |
| 2795 | GGTAGTAGCCAATTTGG | NC_045512.2 | 3′→5′ | 28519 | 28535 |
| 2796 | CGGTAGTAGCCAATTTG | NC_045512.2 | 3′→5′ | 28520 | 28536 |
| 2797 | TCGGTAGTAGCCAATTT | NC_045512.2 | 3′→5′ | 28521 | 28537 |
| 2798 | TTCGGTAGTAGCCAATT | NC_045512.2 | 3′→5′ | 28522 | 28538 |
| 2799 | CTTCGGTAGTAGCCAAT | NC_045512.2 | 3′→5′ | 28523 | 28539 |
| 2800 | TCTTCGGTAGTAGCCAA | NC_045512.2 | 3′→5′ | 28524 | 28540 |
| 2801 | CTCTTCGGTAGTAGCCA | NC_045512.2 | 3′→5′ | 28525 | 28541 |
| 2802 | GCTCTTCGGTAGTAGCC | NC_045512.2 | 3′→5′ | 28526 | 28542 |
| 2803 | AGCTCTTCGGTAGTAGC | NC_045512.2 | 3′→5′ | 28527 | 28543 |
| 2804 | TAGCTCTTCGGTAGTAG | NC_045512.2 | 3′→5′ | 28528 | 28544 |
| 2805 | GTAGCTCTTCGGTAGTA | NC_045512.2 | 3′→5′ | 28529 | 28545 |
| 2806 | GGTAGCTCTTCGGTAGT | NC_045512.2 | 3′→5′ | 28530 | 28546 |
| 2807 | AAGGCTCCCTCAGTTGC | NC_045512.2 | 3′→5′ | 28673 | 28689 |
| 2808 | CAAGGCTCCCTCAGTTG | NC_045512.2 | 3′→5′ | 28674 | 28690 |
| 2809 | TCAAGGCTCCCTCAGTT | NC_045512.2 | 3′→5′ | 28675 | 28691 |
| 2810 | TTCAAGGCTCCCTCAGT | NC_045512.2 | 3′→5′ | 28676 | 28692 |
| 2811 | TTGCGGGTGCCAATGTG | NC_045512.2 | 3′→5′ | 28706 | 28722 |
| 2812 | ATTGCGGGTGCCAATGT | NC_045512.2 | 3′→5′ | 28707 | 28723 |
| 2813 | GATTGCGGGTGCCAATG | NC_045512.2 | 3′→5′ | 28708 | 28724 |
| 2814 | GGATTGCGGGTGCCAAT | NC_045512.2 | 3′→5′ | 28709 | 28725 |
| 2815 | AGGATTGCGGGTGCCAA | NC_045512.2 | 3′→5′ | 28710 | 28726 |
| 2816 | GAGGAAGTTGTAGCACG | NC_045512.2 | 3′→5′ | 28744 | 28760 |
| 2817 | TGAGGAAGTTGTAGCAC | NC_045512.2 | 3′→5′ | 28745 | 28761 |
| 2818 | TTGAGGAAGTTGTAGCA | NC_045512.2 | 3′→5′ | 28746 | 28762 |
| 2819 | CTTGAGGAAGTTGTAGC | NC_045512.2 | 3′→5′ | 28747 | 28763 |
| 2820 | CCTTGAGGAAGTTGTAG | NC_045512.2 | 3′→5′ | 28748 | 28764 |
| 2821 | TCCTTGAGGAAGTTGTA | NC_045512.2 | 3′→5′ | 28749 | 28765 |
| 2822 | TTCCTTGAGGAAGTTGT | NC_045512.2 | 3′→5′ | 28750 | 28766 |
| 2823 | GTTCCTTGAGGAAGTTG | NC_045512.2 | 3′→5′ | 28751 | 28767 |
| 2824 | TGTTCCTTGAGGAAGTT | NC_045512.2 | 3′→5′ | 28752 | 28768 |
| 2825 | TTGTTCCTTGAGGAAGT | NC_045512.2 | 3′→5′ | 28753 | 28769 |
| 2826 | GTTGTTCCTTGAGGAAG | NC_045512.2 | 3′→5′ | 28754 | 28770 |
| 2827 | TGTTGTTCCTTGAGGAA | NC_045512.2 | 3′→5′ | 28755 | 28771 |
| 2828 | ATGTTGTTCCTTGAGGA | NC_045512.2 | 3′→5′ | 28756 | 28772 |
| 2829 | AATGTTGTTCCTTGAGG | NC_045512.2 | 3′→5′ | 28757 | 28773 |
| 2830 | CAATGTTGTTCCTTGAG | NC_045512.2 | 3′→5′ | 28758 | 28774 |
| 2831 | GCAATGTTGTTCCTTGA | NC_045512.2 | 3′→5′ | 28759 | 28775 |
| 2832 | GGCAATGTTGTTCCTTG | NC_045512.2 | 3′→5′ | 28760 | 28776 |
| 2833 | TGGCAATGTTGTTCCTT | NC_045512.2 | 3′→5′ | 28761 | 28777 |
| 2834 | TTGGCAATGTTGTTCCT | NC_045512.2 | 3′→5′ | 28762 | 28778 |
| 2835 | TTTGGCAATGTTGTTCC | NC_045512.2 | 3′→5′ | 28763 | 28779 |
| 2836 | TTTTGGCAATGTTGTTC | NC_045512.2 | 3′→5′ | 28764 | 28780 |
| 2837 | CTTTTGGCAATGTTGTT | NC_045512.2 | 3′→5′ | 28765 | 28781 |
| 2838 | CCTTTTGGCAATGTTGT | NC_045512.2 | 3′→5′ | 28766 | 28782 |
| 2839 | GCCTTTTGGCAATGTTG | NC_045512.2 | 3′→5′ | 28767 | 28783 |
| 2840 | AGCCTTTTGGCAATGTT | NC_045512.2 | 3′→5′ | 28768 | 28784 |
| 2841 | AAGCCTTTTGGCAATGT | NC_045512.2 | 3′→5′ | 28769 | 28785 |
| 2842 | GAAGCCTTTTGGCAATG | NC_045512.2 | 3′→5′ | 28770 | 28786 |
| 2843 | AGAAGCCTTTTGGCAAT | NC_045512.2 | 3′→5′ | 28771 | 28787 |
| 2844 | TAGAAGCCTTTTGGCAA | NC_045512.2 | 3′→5′ | 28772 | 28788 |
| 2845 | GTAGAAGCCTTTTGGCA | NC_045512.2 | 3′→5′ | 28773 | 28789 |
| 2846 | CGTAGAAGCCTTTTGGC | NC_045512.2 | 3′→5′ | 28774 | 28790 |
| 2847 | GCGTAGAAGCCTTTTGG | NC_045512.2 | 3′→5′ | 28775 | 28791 |
| 2848 | TGCGTAGAAGCCTTTTG | NC_045512.2 | 3′→5′ | 28776 | 28792 |
| 2849 | CTGCGTAGAAGCCTTTT | NC_045512.2 | 3′→5′ | 28777 | 28793 |
| 2850 | TCTGCGTAGAAGCCTTT | NC_045512.2 | 3′→5′ | 28778 | 28794 |
| 2851 | TGACTGCCGCCTCTGCT | NC_045512.2 | 3′→5′ | 28799 | 28815 |
| 2852 | TTGACTGCCGCCTCTGC | NC_045512.2 | 3′→5′ | 28800 | 28816 |
| 2853 | CTTGACTGCCGCCTCTG | NC_045512.2 | 3′→5′ | 28801 | 28817 |
| 2854 | GCTTGACTGCCGCCTCT | NC_045512.2 | 3′→5′ | 28802 | 28818 |
| 2855 | GGCTTGACTGCCGCCTC | NC_045512.2 | 3′→5′ | 28803 | 28819 |
| 2856 | AGGCTTGACTGCCGCCT | NC_045512.2 | 3′→5′ | 28804 | 28820 |
| 2857 | GAGGCTTGACTGCCGCC | NC_045512.2 | 3′→5′ | 28805 | 28821 |
| 2858 | AGAGGCTTGACTGCCGC | NC_045512.2 | 3′→5′ | 28806 | 28822 |
| 2859 | AAGAGGCTTGACTGCCG | NC_045512.2 | 3′→5′ | 28807 | 28823 |
| 2860 | GAAGAGGCTTGACTGCC | NC_045512.2 | 3′→5′ | 28808 | 28824 |
| 2861 | AGAAGAGGCTTGACTGC | NC_045512.2 | 3′→5′ | 28809 | 28825 |
| 2862 | GAGAAGAGGCTTGACTG | NC_045512.2 | 3′→5′ | 28810 | 28826 |
| 2863 | CGAGAAGAGGCTTGACT | NC_045512.2 | 3′→5′ | 28811 | 28827 |
| 2864 | GAGTTGAATTTCTTGAA | NC_045512.2 | 3′→5′ | 28852 | 28868 |
| 2865 | GGAGTTGAATTTCTTGA | NC_045512.2 | 3′→5′ | 28853 | 28869 |
| 2866 | AGCTGGTTCAATCTGTC | NC_045512.2 | 3′→5′ | 28946 | 28962 |
| 2867 | AAGCTGGTTCAATCTGT | NC_045512.2 | 3′→5′ | 28947 | 28963 |
| 2868 | CAAGCTGGTTCAATCTG | NC_045512.2 | 3′→5′ | 28948 | 28964 |
| 2869 | TCAAGCTGGTTCAATCT | NC_045512.2 | 3′→5′ | 28949 | 28965 |
| 2870 | CTCAAGCTGGTTCAATC | NC_045512.2 | 3′→5′ | 28950 | 28966 |
| 2871 | TCTCAAGCTGGTTCAAT | NC_045512.2 | 3′→5′ | 28951 | 28967 |
| 2872 | CTCTCAAGCTGGTTCAA | NC_045512.2 | 3′→5′ | 28952 | 28968 |
| 2873 | GCTCTCAAGCTGGTTCA | NC_045512.2 | 3′→5′ | 28953 | 28969 |
| 2874 | TGCTCTCAAGCTGGTTC | NC_045512.2 | 3′→5′ | 28954 | 28970 |
| 2875 | TTGCTCTCAAGCTGGTT | NC_045512.2 | 3′→5′ | 28955 | 28971 |
| 2876 | TTTGCTCTCAAGCTGGT | NC_045512.2 | 3′→5′ | 28956 | 28972 |
| 2877 | TGTTGGCCTTTACCAGA | NC_045512.2 | 3′→5′ | 28976 | 28992 |
| 2878 | TTGTTGGCCTTTACCAG | NC_045512.2 | 3′→5′ | 28977 | 28993 |
| 2879 | GTTGTTGGCCTTTACCA | NC_045512.2 | 3′→5′ | 28978 | 28994 |
| 2880 | TGTTGTTGGCCTTTACC | NC_045512.2 | 3′→5′ | 28979 | 28995 |
| 2881 | TTGTTGTTGGCCTTTAC | NC_045512.2 | 3′→5′ | 28980 | 28996 |
| 2882 | GTTGTTGTTGGCCTTTA | NC_045512.2 | 3′→5′ | 28981 | 28997 |
| 2883 | TGTTGTTGTTGGCCTTT | NC_045512.2 | 3′→5′ | 28982 | 28998 |
| 2884 | TTGTTGTTGTTGGCCTT | NC_045512.2 | 3′→5′ | 28983 | 28999 |
| 2885 | CTTGTTGTTGTTGGCCT | NC_045512.2 | 3′→5′ | 28984 | 29000 |
| 2886 | CCTTGTTGTTGTTGGCC | NC_045512.2 | 3′→5′ | 28985 | 29001 |
| 2887 | GCCTTGTTGTTGTTGGC | NC_045512.2 | 3′→5′ | 28986 | 29002 |
| 2888 | GGCCTTGTTGTTGTTGG | NC_045512.2 | 3′→5′ | 28987 | 29003 |
| 2889 | TGGCCTTGTTGTTGTTG | NC_045512.2 | 3′→5′ | 28988 | 29004 |
| 2890 | TTGGCCTTGTTGTTGTT | NC_045512.2 | 3′→5′ | 28989 | 29005 |
| 2891 | TTTGGCCTTGTTGTTGT | NC_045512.2 | 3′→5′ | 28990 | 29006 |
| 2892 | GTTTGGCCTTGTTGTTG | NC_045512.2 | 3′→5′ | 28991 | 29007 |
| 2893 | AGTTTGGCCTTGTTGTT | NC_045512.2 | 3′→5′ | 28992 | 29008 |
| 2894 | CAGTTTGGCCTTGTTGT | NC_045512.2 | 3′→5′ | 28993 | 29009 |
| 2895 | ACAGTTTGGCCTTGTTG | NC_045512.2 | 3′→5′ | 28994 | 29010 |
| 2896 | GACAGTTTGGCCTTGTT | NC_045512.2 | 3′→5′ | 28995 | 29011 |
| 2897 | TGACAGTTTGGCCTTGT | NC_045512.2 | 3′→5′ | 28996 | 29012 |
| 2898 | GTGACAGTTTGGCCTTG | NC_045512.2 | 3′→5′ | 28997 | 29013 |
| 2899 | AGTGACAGTTTGGCCTT | NC_045512.2 | 3′→5′ | 28998 | 29014 |
| 2900 | TAGTGACAGTTTGGCCT | NC_045512.2 | 3′→5′ | 28999 | 29015 |
| 2901 | TTAGTGACAGTTTGGCC | NC_045512.2 | 3′→5′ | 29000 | 29016 |
| 2902 | CTTAGTGACAGTTTGGC | NC_045512.2 | 3′→5′ | 29001 | 29017 |
| 2903 | TCTTAGTGACAGTTTGG | NC_045512.2 | 3′→5′ | 29002 | 29018 |
| 2904 | TTCTTAGTGACAGTTTG | NC_045512.2 | 3′→5′ | 29003 | 29019 |
| 2905 | TTTCTTAGTGACAGTTT | NC_045512.2 | 3′→5′ | 29004 | 29020 |
| 2906 | ATTTCTTAGTGACAGTT | NC_045512.2 | 3′→5′ | 29005 | 29021 |
| 2907 | GATTTCTTAGTGACAGT | NC_045512.2 | 3′→5′ | 29006 | 29022 |
| 2908 | AGATTTCTTAGTGACAG | NC_045512.2 | 3′→5′ | 29007 | 29023 |
| 2909 | CAGATTTCTTAGTGACA | NC_045512.2 | 3′→5′ | 29008 | 29024 |
| 2910 | GCAGATTTCTTAGTGAC | NC_045512.2 | 3′→5′ | 29009 | 29025 |
| 2911 | AGCAGATTTCTTAGTGA | NC_045512.2 | 3′→5′ | 29010 | 29026 |
| 2912 | CAGCAGATTTCTTAGTG | NC_045512.2 | 3′→5′ | 29011 | 29027 |
| 2913 | GCAGCAGATTTCTTAGT | NC_045512.2 | 3′→5′ | 29012 | 29028 |
| 2914 | AGCAGCAGATTTCTTAG | NC_045512.2 | 3′→5′ | 29013 | 29029 |
| 2915 | CAGCAGCAGATTTCTTA | NC_045512.2 | 3′→5′ | 29014 | 29030 |
| 2916 | TCAGCAGCAGATTTCTT | NC_045512.2 | 3′→5′ | 29015 | 29031 |
| 2917 | CTCAGCAGCAGATTTCT | NC_045512.2 | 3′→5′ | 29016 | 29032 |
| 2918 | CCTCAGCAGCAGATTTC | NC_045512.2 | 3′→5′ | 29017 | 29033 |
| 2919 | GCCTCAGCAGCAGATTT | NC_045512.2 | 3′→5′ | 29018 | 29034 |
| 2920 | GTTCCTTGTCTGATTAG | NC_045512.2 | 3′→5′ | 29144 | 29160 |
| 2921 | AGTTCCTTGTCTGATTA | NC_045512.2 | 3′→5′ | 29145 | 29161 |
| 2922 | CAGTTCCTTGTCTGATT | NC_045512.2 | 3′→5′ | 29146 | 29162 |
| 2923 | TCAGTTCCTTGTCTGAT | NC_045512.2 | 3′→5′ | 29147 | 29163 |
| 2924 | ATCAGTTCCTTGTCTGA | NC_045512.2 | 3′→5′ | 29148 | 29164 |
| 2925 | AATCAGTTCCTTGTCTG | NC_045512.2 | 3′→5′ | 29149 | 29165 |
| 2926 | TAATCAGTTCCTTGTCT | NC_045512.2 | 3′→5′ | 29150 | 29166 |
| 2927 | GTAATCAGTTCCTTGTC | NC_045512.2 | 3′→5′ | 29151 | 29167 |
| 2928 | TGTAATCAGTTCCTTGT | NC_045512.2 | 3′→5′ | 29152 | 29168 |
| 2929 | TTGTAATCAGTTCCTTG | NC_045512.2 | 3′→5′ | 29153 | 29169 |
| 2930 | TTTGTAATCAGTTCCTT | NC_045512.2 | 3′→5′ | 29154 | 29170 |
| 2931 | GTTTGTAATCAGTTCCT | NC_045512.2 | 3′→5′ | 29155 | 29171 |
| 2932 | TGTTTGTAATCAGTTCC | NC_045512.2 | 3′→5′ | 29156 | 29172 |
| 2933 | TGTGCAATTTGCGGCCA | NC_045512.2 | 3′→5′ | 29174 | 29190 |
| 2934 | TTGTGCAATTTGCGGCC | NC_045512.2 | 3′→5′ | 29175 | 29191 |
| 2935 | ATTGTGCAATTTGCGGC | NC_045512.2 | 3′→5′ | 29176 | 29192 |
| 2936 | AATTGTGCAATTTGCGG | NC_045512.2 | 3′→5′ | 29177 | 29193 |
| 2937 | AAATTGTGCAATTTGCG | NC_045512.2 | 3′→5′ | 29178 | 29194 |
| 2938 | CAAATTGTGCAATTTGC | NC_045512.2 | 3′→5′ | 29179 | 29195 |
| 2939 | GCAAATTGTGCAATTTG | NC_045512.2 | 3′→5′ | 29180 | 29196 |
| 2940 | ACTTCCATGCCAATGCG | NC_045512.2 | 3′→5′ | 29228 | 29244 |
| 2941 | GACTTCCATGCCAATGC | NC_045512.2 | 3′→5′ | 29229 | 29245 |
| 2942 | TGACTTCCATGCCAATG | NC_045512.2 | 3′→5′ | 29230 | 29246 |
| 2943 | GTGACTTCCATGCCAAT | NC_045512.2 | 3′→5′ | 29231 | 29247 |
| 2944 | TGTGACTTCCATGCCAA | NC_045512.2 | 3′→5′ | 29232 | 29248 |
| 2945 | GTGTGACTTCCATGCCA | NC_045512.2 | 3′→5′ | 29233 | 29249 |
| 2946 | GGTGTGACTTCCATGCC | NC_045512.2 | 3′→5′ | 29234 | 29250 |
| 2947 | AGGTGTGACTTCCATGC | NC_045512.2 | 3′→5′ | 29235 | 29251 |
| 2948 | AAGGTGTGACTTCCATG | NC_045512.2 | 3′→5′ | 29236 | 29252 |
| 2949 | GAAGGTGTGACTTCCAT | NC_045512.2 | 3′→5′ | 29237 | 29253 |
| 2950 | CGAAGGTGTGACTTCCA | NC_045512.2 | 3′→5′ | 29238 | 29254 |
| 2951 | CCGAAGGTGTGACTTCC | NC_045512.2 | 3′→5′ | 29239 | 29255 |
| 2952 | CCCGAAGGTGTGACTTC | NC_045512.2 | 3′→5′ | 29240 | 29256 |
| 2953 | TCCCGAAGGTGTGACTT | NC_045512.2 | 3′→5′ | 29241 | 29257 |
| 2954 | TTCCCGAAGGTGTGACT | NC_045512.2 | 3′→5′ | 29242 | 29258 |
| 2955 | GTTCCCGAAGGTGTGAC | NC_045512.2 | 3′→5′ | 29243 | 29259 |
| 2956 | TCTTTGTCATCCAATTT | NC_045512.2 | 3′→5′ | 29285 | 29301 |
| 2957 | ATCTTTGTCATCCAATT | NC_045512.2 | 3′→5′ | 29286 | 29302 |
| 2958 | GATCTTTGTCATCCAAT | NC_045512.2 | 3′→5′ | 29287 | 29303 |
| 2959 | GGATCTTTGTCATCCAA | NC_045512.2 | 3′→5′ | 29288 | 29304 |
| 2960 | TGGATCTTTGTCATCCA | NC_045512.2 | 3′→5′ | 29289 | 29305 |
| 2961 | GTTTTGTATGCGTCAAT | NC_045512.2 | 3′→5′ | 29342 | 29358 |
| 2962 | TGTTTTGTATGCGTCAA | NC_045512.2 | 3′→5′ | 29343 | 29359 |
| 2963 | ATGTTTTGTATGCGTCA | NC_045512.2 | 3′→5′ | 29344 | 29360 |
| 2964 | AATGTTTTGTATGCGTC | NC_045512.2 | 3′→5′ | 29345 | 29361 |
| 2965 | GAATGTTTTGTATGCGT | NC_045512.2 | 3′→5′ | 29346 | 29362 |
| 2966 | GGAATGTTTTGTATGCG | NC_045512.2 | 3′→5′ | 29347 | 29363 |
| 2967 | GGGAATGTTTTGTATGC | NC_045512.2 | 3′→5′ | 29348 | 29364 |
| 2968 | TGGGAATGTTTTGTATG | NC_045512.2 | 3′→5′ | 29349 | 29365 |
| 2969 | GTGGGAATGTTTTGTAT | NC_045512.2 | 3′→5′ | 29350 | 29366 |
| 2970 | GGTGGGAATGTTTTGTA | NC_045512.2 | 3′→5′ | 29351 | 29367 |
| 2971 | TGGTGGGAATGTTTTGT | NC_045512.2 | 3′→5′ | 29352 | 29368 |
| 2972 | TTGGTGGGAATGTTTTG | NC_045512.2 | 3′→5′ | 29353 | 29369 |
| 2973 | GTTGGTGGGAATGTTTT | NC_045512.2 | 3′→5′ | 29354 | 29370 |
| 2974 | TGTTGGTGGGAATGTTT | NC_045512.2 | 3′→5′ | 29355 | 29371 |
| 2975 | CTGTTGGTGGGAATGTT | NC_045512.2 | 3′→5′ | 29356 | 29372 |
| 2976 | TCTGTTGGTGGGAATGT | NC_045512.2 | 3′→5′ | 29357 | 29373 |
| 2977 | CTCTGTTGGTGGGAATG | NC_045512.2 | 3′→5′ | 29358 | 29374 |
| 2978 | GCTCTGTTGGTGGGAAT | NC_045512.2 | 3′→5′ | 29359 | 29375 |
| 2979 | GGCTCTGTTGGTGGGAA | NC_045512.2 | 3′→5′ | 29360 | 29376 |
| 2980 | AGGCTCTGTTGGTGGGA | NC_045512.2 | 3′→5′ | 29361 | 29377 |
| 2981 | TAGGCTCTGTTGGTGGG | NC_045512.2 | 3′→5′ | 29362 | 29378 |
| 2982 | TTAGGCTCTGTTGGTGG | NC_045512.2 | 3′→5′ | 29363 | 29379 |
| 2983 | TTTAGGCTCTGTTGGTG | NC_045512.2 | 3′→5′ | 29364 | 29380 |
| 2984 | TTTTAGGCTCTGTTGGT | NC_045512.2 | 3′→5′ | 29365 | 29381 |
| 2985 | TTTTTAGGCTCTGTTGG | NC_045512.2 | 3′→5′ | 29366 | 29382 |
| 2986 | CTTTTTAGGCTCTGTTG | NC_045512.2 | 3′→5′ | 29367 | 29383 |
| 2987 | CCTTTTTAGGCTCTGTT | NC_045512.2 | 3′→5′ | 29368 | 29384 |
| 2988 | TCCTTTTTAGGCTCTGT | NC_045512.2 | 3′→5′ | 29369 | 29385 |
| 2989 | GTCCTTTTTAGGCTCTG | NC_045512.2 | 3′→5′ | 29370 | 29386 |
| 2990 | TGTCCTTTTTAGGCTCT | NC_045512.2 | 3′→5′ | 29371 | 29387 |
| 2991 | TTGTCCTTTTTAGGCTC | NC_045512.2 | 3′→5′ | 29372 | 29388 |
| 2992 | TTTGTCCTTTTTAGGCT | NC_045512.2 | 3′→5′ | 29373 | 29389 |
| 2993 | TTTTGTCCTTTTTAGGC | NC_045512.2 | 3′→5′ | 29374 | 29390 |
| 2994 | TTTTTGTCCTTTTTAGG | NC_045512.2 | 3′→5′ | 29375 | 29391 |
| 2995 | CTTTTTGTCCTTTTTAG | NC_045512.2 | 3′→5′ | 29376 | 29392 |
| 2996 | TCTTTTTGTCCTTTTTA | NC_045512.2 | 3′→5′ | 29377 | 29393 |
| 2997 | TTCTTTTTGTCCTTTTT | NC_045512.2 | 3′→5′ | 29378 | 29394 |
| 2998 | GGAAGAAGAGTCACAGT | NC_045512.2 | 3′→5′ | 29444 | 29460 |
| 2999 | AGGAAGAAGAGTCACAG | NC_045512.2 | 3′→5′ | 29445 | 29461 |
| 3000 | CAGGAAGAAGAGTCACA | NC_045512.2 | 3′→5′ | 29446 | 29462 |
| 3001 | GCAGGAAGAAGAGTCAC | NC_045512.2 | 3′→5′ | 29447 | 29463 |
| 3002 | ATCTGCCTTGTGTGGTC | NC_045512.2 | 3′→5′ | 29543 | 29559 |
| 3003 | CATCTGCCTTGTGTGGT | NC_045512.2 | 3′→5′ | 29544 | 29560 |
| 3004 | CCATCTGCCTTGTGTGG | NC_045512.2 | 3′→5′ | 29545 | 29561 |
| 3005 | CCCATCTGCCTTGTGTG | NC_045512.2 | 3′→5′ | 29546 | 29562 |
| 3006 | GCCCATCTGCCTTGTGT | NC_045512.2 | 3′→5′ | 29547 | 29563 |
| 3007 | AGCCCATCTGCCTTGTG | NC_045512.2 | 3′→5′ | 29548 | 29564 |
| 3008 | TAGCCCATCTGCCTTGT | NC_045512.2 | 3′→5′ | 29549 | 29565 |
| 3009 | ATAGCCCATCTGCCTTG | NC_045512.2 | 3′→5′ | 29550 | 29566 |
| 3010 | GCACAAGAGTAGACTAT | NC_045512.2 | 3′→5′ | 29598 | 29614 |
| 3011 | TGCACAAGAGTAGACTA | NC_045512.2 | 3′→5′ | 29599 | 29615 |
| 3012 | CTGCACAAGAGTAGACT | NC_045512.2 | 3′→5′ | 29600 | 29616 |
| 3013 | TCTGCACAAGAGTAGAC | NC_045512.2 | 3′→5′ | 29601 | 29617 |
| 3014 | TTCTGCACAAGAGTAGA | NC_045512.2 | 3′→5′ | 29602 | 29618 |
| 3015 | ATTCTGCACAAGAGTAG | NC_045512.2 | 3′→5′ | 29603 | 29619 |
| 3016 | CATTCTGCACAAGAGTA | NC_045512.2 | 3′→5′ | 29604 | 29620 |
| 3017 | TCATTCTGCACAAGAGT | NC_045512.2 | 3′→5′ | 29605 | 29621 |
| 3018 | TTCATTCTGCACAAGAG | NC_045512.2 | 3′→5′ | 29606 | 29622 |
| 3019 | ATTCATTCTGCACAAGA | NC_045512.2 | 3′→5′ | 29607 | 29623 |
| 3020 | AATTCATTCTGCACAAG | NC_045512.2 | 3′→5′ | 29608 | 29624 |
| 3021 | GAATTCATTCTGCACAA | NC_045512.2 | 3′→5′ | 29609 | 29625 |
| 3022 | AGAATTCATTCTGCACA | NC_045512.2 | 3′→5′ | 29610 | 29626 |
| 3023 | GAGAATTCATTCTGCAC | NC_045512.2 | 3′→5′ | 29611 | 29627 |
| 3024 | CGAGAATTCATTCTGCA | NC_045512.2 | 3′→5′ | 29612 | 29628 |
| 3025 | ACGAGAATTCATTCTGC | NC_045512.2 | 3′→5′ | 29613 | 29629 |
| 3026 | TACGAGAATTCATTCTG | NC_045512.2 | 3′→5′ | 29614 | 29630 |
| 3027 | GAGATTAAAGTTAACTA | NC_045512.2 | 3′→5′ | 29652 | 29668 |
| 3028 | TGAGATTAAAGTTAACT | NC_045512.2 | 3′→5′ | 29653 | 29669 |
| 3029 | GTGAGATTAAAGTTAAC | NC_045512.2 | 3′→5′ | 29654 | 29670 |
| 3030 | TGTGAGATTAAAGTTAA | NC_045512.2 | 3′→5′ | 29655 | 29671 |
| 3031 | ATGTGAGATTAAAGTTA | NC_045512.2 | 3′→5′ | 29656 | 29672 |
| 3032 | TATGTGAGATTAAAGTT | NC_045512.2 | 3′→5′ | 29657 | 29673 |
| 3033 | CTATGTGAGATTAAAGT | NC_045512.2 | 3′→5′ | 29658 | 29674 |
| 3034 | GCTATGTGAGATTAAAG | NC_045512.2 | 3′→5′ | 29659 | 29675 |
| 3035 | TGCTATGTGAGATTAAA | NC_045512.2 | 3′→5′ | 29660 | 29676 |
| 3036 | TTGCTATGTGAGATTAA | NC_045512.2 | 3′→5′ | 29661 | 29677 |
| 3037 | ATTGCTATGTGAGATTA | NC_045512.2 | 3′→5′ | 29662 | 29678 |
| 3038 | GATTGCTATGTGAGATT | NC_045512.2 | 3′→5′ | 29663 | 29679 |
| 3039 | AGATTGCTATGTGAGAT | NC_045512.2 | 3′→5′ | 29664 | 29680 |
| 3040 | AAGATTGCTATGTGAGA | NC_045512.2 | 3′→5′ | 29665 | 29681 |
| 3041 | AAAGATTGCTATGTGAG | NC_045512.2 | 3′→5′ | 29666 | 29682 |
| 3042 | TAAAGATTGCTATGTGA | NC_045512.2 | 3′→5′ | 29667 | 29683 |
| 3043 | TTAAAGATTGCTATGTG | NC_045512.2 | 3′→5′ | 29668 | 29684 |
| 3044 | ATTAAAGATTGCTATGT | NC_045512.2 | 3′→5′ | 29669 | 29685 |
| 3045 | GATTAAAGATTGCTATG | NC_045512.2 | 3′→5′ | 29670 | 29686 |
| 3046 | TGATTAAAGATTGCTAT | NC_045512.2 | 3′→5′ | 29671 | 29687 |
| 3047 | CTCCCTAATGTTACACA | NC_045512.2 | 3′→5′ | 29689 | 29705 |
| 3048 | CCTCCCTAATGTTACAC | NC_045512.2 | 3′→5′ | 29690 | 29706 |
| 3049 | TCCTCCCTAATGTTACA | NC_045512.2 | 3′→5′ | 29691 | 29707 |
| 3050 | GTCCTCCCTAATGTTAC | NC_045512.2 | 3′→5′ | 29692 | 29708 |
| 3051 | AGTCCTCCCTAATGTTA | NC_045512.2 | 3′→5′ | 29693 | 29709 |
| 3052 | AAGTCCTCCCTAATGTT | NC_045512.2 | 3′→5′ | 29694 | 29710 |
| 3053 | CAAGTCCTCCCTAATGT | NC_045512.2 | 3′→5′ | 29695 | 29711 |
| 3054 | TCAAGTCCTCCCTAATG | NC_045512.2 | 3′→5′ | 29696 | 29712 |
| 3055 | TTCAAGTCCTCCCTAAT | NC_045512.2 | 3′→5′ | 29697 | 29713 |
| 3056 | TTTCAAGTCCTCCCTAA | NC_045512.2 | 3′→5′ | 29698 | 29714 |
| 3057 | CTTTCAAGTCCTCCCTA | NC_045512.2 | 3′→5′ | 29699 | 29715 |
| 3058 | TCTTTCAAGTCCTCCCT | NC_045512.2 | 3′→5′ | 29700 | 29716 |
| 3059 | CTCTTTCAAGTCCTCCC | NC_045512.2 | 3′→5′ | 29701 | 29717 |
| 3060 | GCTCTTTCAAGTCCTCC | NC_045512.2 | 3′→5′ | 29702 | 29718 |
| 3061 | GGCTCTTTCAAGTCCTC | NC_045512.2 | 3′→5′ | 29703 | 29719 |
| 3062 | TGGCTCTTTCAAGTCCT | NC_045512.2 | 3′→5′ | 29704 | 29720 |
| 3063 | GTGGCTCTTTCAAGTCC | NC_045512.2 | 3′→5′ | 29705 | 29721 |
| 3064 | GGTGGCTCTTTCAAGTC | NC_045512.2 | 3′→5′ | 29706 | 29722 |
| 3065 | TGGTGGCTCTTTCAAGT | NC_045512.2 | 3′→5′ | 29707 | 29723 |
| 3066 | GTGGTGGCTCTTTCAAG | NC_045512.2 | 3′→5′ | 29708 | 29724 |
| 3067 | TGTGGTGGCTCTTTCAA | NC_045512.2 | 3′→5′ | 29709 | 29725 |
| 3068 | ATGTGGTGGCTCTTTCA | NC_045512.2 | 3′→5′ | 29710 | 29726 |
| 3069 | AATGTGGTGGCTCTTTC | NC_045512.2 | 3′→5′ | 29711 | 29727 |
| 3070 | AAATGTGGTGGCTCTTT | NC_045512.2 | 3′→5′ | 29712 | 29728 |
| 3071 | AAAATGTGGTGGCTCTT | NC_045512.2 | 3′→5′ | 29713 | 29729 |
| 3072 | GAAAATGTGGTGGCTCT | NC_045512.2 | 3′→5′ | 29714 | 29730 |
| 3073 | TGAAAATGTGGTGGCTC | NC_045512.2 | 3′→5′ | 29715 | 29731 |
| 3074 | TACTCCGCGTGGCCTCG | NC_045512.2 | 3′→5′ | 29733 | 29749 |
| 3075 | GTACTCCGCGTGGCCTC | NC_045512.2 | 3′→5′ | 29734 | 29750 |
| 3076 | CGTACTCCGCGTGGCCT | NC_045512.2 | 3′→5′ | 29735 | 29751 |
| 3077 | TCGTACTCCGCGTGGCC | NC_045512.2 | 3′→5′ | 29736 | 29752 |
| 3078 | ATCGTACTCCGCGTGGC | NC_045512.2 | 3′→5′ | 29737 | 29753 |
| 3079 | GATCGTACTCCGCGTGG | NC_045512.2 | 3′→5′ | 29738 | 29754 |
| 3080 | CGATCGTACTCCGCGTG | NC_045512.2 | 3′→5′ | 29739 | 29755 |
| 3081 | TCGATCGTACTCCGCGT | NC_045512.2 | 3′→5′ | 29740 | 29756 |
| 3082 | CTCGATCGTACTCCGCG | NC_045512.2 | 3′→5′ | 29741 | 29757 |
| 3083 | CAGCTCTCCCTAGCATT | NC_045512.2 | 3′→5′ | 29770 | 29786 |
| 3084 | GCAGCTCTCCCTAGCAT | NC_045512.2 | 3′→5′ | 29771 | 29787 |
| 3085 | GGCAGCTCTCCCTAGCA | NC_045512.2 | 3′→5′ | 29772 | 29788 |
| 3086 | AGGCAGCTCTCCCTAGC | NC_045512.2 | 3′→5′ | 29773 | 29789 |
| 3087 | TAGGCAGCTCTCCCTAG | NC_045512.2 | 3′→5′ | 29774 | 29790 |
| 3088 | ATAGGCAGCTCTCCCTA | NC_045512.2 | 3′→5′ | 29775 | 29791 |
| 3089 | TATAGGCAGCTCTCCCT | NC_045512.2 | 3′→5′ | 29776 | 29792 |
| 3090 | ATATAGGCAGCTCTCCC | NC_045512.2 | 3′→5′ | 29777 | 29793 |
| 3091 | CATATAGGCAGCTCTCC | NC_045512.2 | 3′→5′ | 29778 | 29794 |
| 3092 | CCATATAGGCAGCTCTC | NC_045512.2 | 3′→5′ | 29779 | 29795 |
| 3093 | TCCATATAGGCAGCTCT | NC_045512.2 | 3′→5′ | 29780 | 29796 |
| 3094 | TTCCATATAGGCAGCTC | NC_045512.2 | 3′→5′ | 29781 | 29797 |
| 3095 | CTTCCATATAGGCAGCT | NC_045512.2 | 3′→5′ | 29782 | 29798 |
| 3096 | TCTTCCATATAGGCAGC | NC_045512.2 | 3′→5′ | 29783 | 29799 |
| 3097 | CTCTTCCATATAGGCAG | NC_045512.2 | 3′→5′ | 29784 | 29800 |
| 3098 | GCTCTTCCATATAGGCA | NC_045512.2 | 3′→5′ | 29785 | 29801 |
| 3099 | GGCTCTTCCATATAGGC | NC_045512.2 | 3′→5′ | 29786 | 29802 |
| 3100 | GGGCTCTTCCATATAGG | NC_045512.2 | 3′→5′ | 29787 | 29803 |
| 3101 | AGGGCTCTTCCATATAG | NC_045512.2 | 3′→5′ | 29788 | 29804 |
| 3102 | TAGGGCTCTTCCATATA | NC_045512.2 | 3′→5′ | 29789 | 29805 |
| 3103 | TTAGGGCTCTTCCATAT | NC_045512.2 | 3′→5′ | 29790 | 29806 |
| 3104 | ATTAGGGCTCTTCCATA | NC_045512.2 | 3′→5′ | 29791 | 29807 |
| 3105 | CATTAGGGCTCTTCCAT | NC_045512.2 | 3′→5′ | 29792 | 29808 |
| 3106 | ACATTAGGGCTCTTCCA | NC_045512.2 | 3′→5′ | 29793 | 29809 |
| 3107 | CACATTAGGGCTCTTCC | NC_045512.2 | 3′→5′ | 29794 | 29810 |
| 3108 | ACACATTAGGGCTCTTC | NC_045512.2 | 3′→5′ | 29795 | 29811 |
| 3109 | TACACATTAGGGCTCTT | NC_045512.2 | 3′→5′ | 29796 | 29812 |
| 3110 | TTACACATTAGGGCTCT | NC_045512.2 | 3′→5′ | 29797 | 29813 |
| 3111 | TTTACACATTAGGGCTC | NC_045512.2 | 3′→5′ | 29798 | 29814 |
| 3112 | TTTTACACATTAGGGCT | NC_045512.2 | 3′→5′ | 29799 | 29815 |
| 3113 | ATTTTACACATTAGGGC | NC_045512.2 | 3′→5′ | 29800 | 29816 |
| 3114 | AATTTTACACATTAGGG | NC_045512.2 | 3′→5′ | 29801 | 29817 |
| 3115 | TAATTTTACACATTAGG | NC_045512.2 | 3′→5′ | 29802 | 29818 |
| 3116 | TTAATTTTACACATTAG | NC_045512.2 | 3′→5′ | 29803 | 29819 |
| 3117 | ATTAATTTTACACATTA | NC_045512.2 | 3′→5′ | 29804 | 29820 |
| 3118 | AATTAATTTTACACATT | NC_045512.2 | 3′→5′ | 29805 | 29821 |
| 3119 | AAATTAATTTTACACAT | NC_045512.2 | 3′→5′ | 29806 | 29822 |
| 3120 | AAAATTAATTTTACACA | NC_045512.2 | 3′→5′ | 29807 | 29823 |
| 3121 | TAAAATTAATTTTACAC | NC_045512.2 | 3′→5′ | 29808 | 29824 |
| 3122 | CTAAAATTAATTTTACA | NC_045512.2 | 3′→5′ | 29809 | 29825 |
| 3123 | ACTAAAATTAATTTTAC | NC_045512.2 | 3′→5′ | 29810 | 29826 |
| 3124 | TACTAAAATTAATTTTA | NC_045512.2 | 3′→5′ | 29811 | 29827 |
| 3125 | CTACTAAAATTAATTTT | NC_045512.2 | 3′→5′ | 29812 | 29828 |
| 3126 | GGACGAAACCGTAAGCAG | NC_045512.2 | 3′→5′ | 190 | 207 |
| 3127 | CGGACGAAACCGTAAGCA | NC_045512.2 | 3′→5′ | 191 | 208 |
| 3128 | ACGGACGAAACCGTAAGC | NC_045512.2 | 3′→5′ | 192 | 209 |
| 3129 | CACGGACGAAACCGTAAG | NC_045512.2 | 3′→5′ | 193 | 210 |
| 3130 | ACACGGACGAAACCGTAA | NC_045512.2 | 3′→5′ | 194 | 211 |
| 3131 | AACACGGACGAAACCGTA | NC_045512.2 | 3′→5′ | 195 | 212 |
| 3132 | CAACACGGACGAAACCGT | NC_045512.2 | 3′→5′ | 196 | 213 |
| 3133 | GCAACACGGACGAAACCG | NC_045512.2 | 3′→5′ | 197 | 214 |
| 3134 | TGCAACACGGACGAAACC | NC_045512.2 | 3′→5′ | 198 | 215 |
| 3135 | CTGCAACACGGACGAAAC | NC_045512.2 | 3′→5′ | 199 | 216 |
| 3136 | CACCCGGACGAAACCTAG | NC_045512.2 | 3′→5′ | 233 | 250 |
| 3137 | ACACCCGGACGAAACCTA | NC_045512.2 | 3′→5′ | 234 | 251 |
| 3138 | CACACCCGGACGAAACCT | NC_045512.2 | 3′→5′ | 235 | 252 |
| 3139 | TCACACCCGGACGAAACC | NC_045512.2 | 3′→5′ | 236 | 253 |
| 3140 | GTCACACCCGGACGAAAC | NC_045512.2 | 3′→5′ | 237 | 254 |
| 3141 | GGTCACACCCGGACGAAA | NC_045512.2 | 3′→5′ | 238 | 255 |
| 3142 | CGGTCACACCCGGACGAA | NC_045512.2 | 3′→5′ | 239 | 256 |
| 3143 | TCGGTCACACCCGGACGA | NC_045512.2 | 3′→5′ | 240 | 257 |
| 3144 | TTCGGTCACACCCGGACG | NC_045512.2 | 3′→5′ | 241 | 258 |
| 3145 | TTTCGGTCACACCCGGAC | NC_045512.2 | 3′→5′ | 242 | 259 |
| 3146 | CTTTCGGTCACACCCGGA | NC_045512.2 | 3′→5′ | 243 | 260 |
| 3147 | CCTTTCGGTCACACCCGG | NC_045512.2 | 3′→5′ | 244 | 261 |
| 3148 | ACCTTTCGGTCACACCCG | NC_045512.2 | 3′→5′ | 245 | 262 |
| 3149 | TACCTTTCGGTCACACCC | NC_045512.2 | 3′→5′ | 246 | 263 |
| 3150 | TTACCTTTCGGTCACACC | NC_045512.2 | 3′→5′ | 247 | 264 |
| 3151 | CTTACCTTTCGGTCACAC | NC_045512.2 | 3′→5′ | 248 | 265 |
| 3152 | TCTTACCTTTCGGTCACA | NC_045512.2 | 3′→5′ | 249 | 266 |
| 3153 | ATCTTACCTTTCGGTCAC | NC_045512.2 | 3′→5′ | 250 | 267 |
| 3154 | CATCTTACCTTTCGGTCA | NC_045512.2 | 3′→5′ | 251 | 268 |
| 3155 | CCATCTTACCTTTCGGTC | NC_045512.2 | 3′→5′ | 252 | 269 |
| 3156 | TCCATCTTACCTTTCGGT | NC_045512.2 | 3′→5′ | 253 | 270 |
| 3157 | CTCCATCTTACCTTTCGG | NC_045512.2 | 3′→5′ | 254 | 271 |
| 3158 | TCTCCATCTTACCTTTCG | NC_045512.2 | 3′→5′ | 255 | 272 |
| 3159 | CTCTCCATCTTACCTTTC | NC_045512.2 | 3′→5′ | 256 | 273 |
| 3160 | GCTCTCCATCTTACCTTT | NC_045512.2 | 3′→5′ | 257 | 274 |
| 3161 | GGCTCTCCATCTTACCTT | NC_045512.2 | 3′→5′ | 258 | 275 |
| 3162 | AGGCTCTCCATCTTACCT | NC_045512.2 | 3′→5′ | 259 | 276 |
| 3163 | AAGGCTCTCCATCTTACC | NC_045512.2 | 3′→5′ | 260 | 277 |
| 3164 | CAAGGCTCTCCATCTTAC | NC_045512.2 | 3′→5′ | 261 | 278 |
| 3165 | ACAAGGCTCTCCATCTTA | NC_045512.2 | 3′→5′ | 262 | 279 |
| 3166 | CGTGTGTTTTCTCGTTGA | NC_045512.2 | 3′→5′ | 288 | 305 |
| 3167 | ACGTGTGTTTTCTCGTTG | NC_045512.2 | 3′→5′ | 289 | 306 |
| 3168 | GACGTGTGTTTTCTCGTT | NC_045512.2 | 3′→5′ | 290 | 307 |
| 3169 | GGACGTGTGTTTTCTCGT | NC_045512.2 | 3′→5′ | 291 | 308 |
| 3170 | TGGACGTGTGTTTTCTCG | NC_045512.2 | 3′→5′ | 292 | 309 |
| 3171 | TTGGACGTGTGTTTTCTC | NC_045512.2 | 3′→5′ | 293 | 310 |
| 3172 | GTTGGACGTGTGTTTTCT | NC_045512.2 | 3′→5′ | 294 | 311 |
| 3173 | AGTTGGACGTGTGTTTTC | NC_045512.2 | 3′→5′ | 295 | 312 |
| 3174 | GAGTTGGACGTGTGTTTT | NC_045512.2 | 3′→5′ | 296 | 313 |
| 3175 | TGAGTTGGACGTGTGTTT | NC_045512.2 | 3′→5′ | 297 | 314 |
| 3176 | CTGAGTTGGACGTGTGTT | NC_045512.2 | 3′→5′ | 298 | 315 |
| 3177 | ACTGAGTTGGACGTGTGT | NC_045512.2 | 3′→5′ | 299 | 316 |
| 3178 | AACTGAGTTGGACGTGTG | NC_045512.2 | 3′→5′ | 300 | 317 |
| 3179 | AAACTGAGTTGGACGTGT | NC_045512.2 | 3′→5′ | 301 | 318 |
| 3180 | CAAACTGAGTTGGACGTG | NC_045512.2 | 3′→5′ | 302 | 319 |
| 3181 | GCAAACTGAGTTGGACGT | NC_045512.2 | 3′→5′ | 303 | 320 |
| 3182 | GGCAAACTGAGTTGGACG | NC_045512.2 | 3′→5′ | 304 | 321 |
| 3183 | AGGCAAACTGAGTTGGAC | NC_045512.2 | 3′→5′ | 305 | 322 |
| 3184 | CAGGCAAACTGAGTTGGA | NC_045512.2 | 3′→5′ | 306 | 323 |
| 3185 | ACAGGCAAACTGAGTTGG | NC_045512.2 | 3′→5′ | 307 | 324 |
| 3186 | CACATAGGGCTGTTCAAG | NC_045512.2 | 3′→5′ | 455 | 472 |
| 3187 | ACACATAGGGCTGTTCAA | NC_045512.2 | 3′→5′ | 456 | 473 |
| 3188 | AACACATAGGGCTGTTCA | NC_045512.2 | 3′→5′ | 457 | 474 |
| 3189 | GAACACATAGGGCTGTTC | NC_045512.2 | 3′→5′ | 458 | 475 |
| 3190 | TGAACACATAGGGCTGTT | NC_045512.2 | 3′→5′ | 459 | 476 |
| 3191 | ATGAACACATAGGGCTGT | NC_045512.2 | 3′→5′ | 460 | 477 |
| 3192 | GTTCTTACGAAGAAGAAC | NC_045512.2 | 3′→5′ | 626 | 643 |
| 3193 | CGTTCTTACGAAGAAGAA | NC_045512.2 | 3′→5′ | 627 | 644 |
| 3194 | CCGTTCTTACGAAGAAGA | NC_045512.2 | 3′→5′ | 628 | 645 |
| 3195 | ACCGTTCTTACGAAGAAG | NC_045512.2 | 3′→5′ | 629 | 646 |
| 3196 | TACCGTTCTTACGAAGAA | NC_045512.2 | 3′→5′ | 630 | 647 |
| 3197 | TTACCGTTCTTACGAAGA | NC_045512.2 | 3′→5′ | 631 | 648 |
| 3198 | ATTACCGTTCTTACGAAG | NC_045512.2 | 3′→5′ | 632 | 649 |
| 3199 | TATTACCGTTCTTACGAA | NC_045512.2 | 3′→5′ | 633 | 650 |
| 3200 | TTATTACCGTTCTTACGA | NC_045512.2 | 3′→5′ | 634 | 651 |
| 3201 | ATCAGTGCCAAGCTCGTC | NC_045512.2 | 3′→5′ | 704 | 721 |
| 3202 | GATCAGTGCCAAGCTCGT | NC_045512.2 | 3′→5′ | 705 | 722 |
| 3203 | GGATCAGTGCCAAGCTCG | NC_045512.2 | 3′→5′ | 706 | 723 |
| 3204 | GTAAGTTTTAAATAACCA | NC_045512.2 | 3′→5′ | 3352 | 3369 |
| 3205 | AGTAAGTTTTAAATAACC | NC_045512.2 | 3′→5′ | 3353 | 3370 |
| 3206 | CAGTAAGTTTTAAATAAC | NC_045512.2 | 3′→5′ | 3354 | 3371 |
| 3207 | TCAGTAAGTTTTAAATAA | NC_045512.2 | 3′→5′ | 3355 | 3372 |
| 3208 | GTCAGTAAGTTTTAAATA | NC_045512.2 | 3′→5′ | 3356 | 3373 |
| 3209 | TGTCAGTAAGTTTTAAAT | NC_045512.2 | 3′→5′ | 3357 | 3374 |
| 3210 | TTGTCAGTAAGTTTTAAA | NC_045512.2 | 3′→5′ | 3358 | 3375 |
| 3211 | ATTGTCAGTAAGTTTTAA | NC_045512.2 | 3′→5′ | 3359 | 3376 |
| 3212 | CATTGTCAGTAAGTTTTA | NC_045512.2 | 3′→5′ | 3360 | 3377 |
| 3213 | ACATTGTCAGTAAGTTTT | NC_045512.2 | 3′→5′ | 3361 | 3378 |
| 3214 | TGCACAAAAGTTAGCAGC | NC_045512.2 | 3′→5′ | 5384 | 5401 |
| 3215 | GTGCACAAAAGTTAGCAG | NC_045512.2 | 3′→5′ | 5385 | 5402 |
| 3216 | AGTGCACAAAAGTTAGCA | NC_045512.2 | 3′→5′ | 5386 | 5403 |
| 3217 | TCCACTACTTCTTCAGAG | NC_045512.2 | 3′→5′ | 6406 | 6423 |
| 3218 | TTCCACTACTTCTTCAGA | NC_045512.2 | 3′→5′ | 6407 | 6424 |
| 3219 | TTTCCACTACTTCTTCAG | NC_045512.2 | 3′→5′ | 6408 | 6425 |
| 3220 | TTTTCCACTACTTCTTCA | NC_045512.2 | 3′→5′ | 6409 | 6426 |
| 3221 | ATTTTCCACTACTTCTTC | NC_045512.2 | 3′→5′ | 6410 | 6427 |
| 3222 | GATTTTCCACTACTTCTT | NC_045512.2 | 3′→5′ | 6411 | 6428 |
| 3223 | GGATTTTCCACTACTTCT | NC_045512.2 | 3′→5′ | 6412 | 6429 |
| 3224 | AGGATTTTCCACTACTTC | NC_045512.2 | 3′→5′ | 6413 | 6430 |
| 3225 | TAGGATTTTCCACTACTT | NC_045512.2 | 3′→5′ | 6414 | 6431 |
| 3226 | GTAGGATTTTCCACTACT | NC_045512.2 | 3′→5′ | 6415 | 6432 |
| 3227 | GGTAGGATTTTCCACTAC | NC_045512.2 | 3′→5′ | 6416 | 6433 |
| 3228 | AACTTCGGTAGTTTTCAC | NC_045512.2 | 3′→5′ | 6461 | 6478 |
| 3229 | CAACTTCGGTAGTTTTCA | NC_045512.2 | 3′→5′ | 6462 | 6479 |
| 3230 | ACAACTTCGGTAGTTTTC | NC_045512.2 | 3′→5′ | 6463 | 6480 |
| 3231 | TACAACTTCGGTAGTTTT | NC_045512.2 | 3′→5′ | 6464 | 6481 |
| 3232 | CTACAACTTCGGTAGTTT | NC_045512.2 | 3′→5′ | 6465 | 6482 |
| 3233 | CCTACAACTTCGGTAGTT | NC_045512.2 | 3′→5′ | 6466 | 6483 |
| 3234 | ATTAACAATAGTTGTACA | NC_045512.2 | 3′→5′ | 7532 | 7549 |
| 3235 | CATTAACAATAGTTGTAC | NC_045512.2 | 3′→5′ | 7533 | 7550 |
| 3236 | CCATTAACAATAGTTGTA | NC_045512.2 | 3′→5′ | 7534 | 7551 |
| 3237 | ATGTCACGAGTGACACCA | NC_045512.2 | 3′→5′ | 8707 | 8724 |
| 3238 | ATGTCAAGTACAAGTAAA | NC_045512.2 | 3′→5′ | 9588 | 9605 |
| 3239 | AATGTCAAGTACAAGTAA | NC_045512.2 | 3′→5′ | 9589 | 9606 |
| 3240 | ACCAACACTACCACATGA | NC_045512.2 | 3′→5′ | 10484 | 10501 |
| 3241 | AACCAACACTACCACATG | NC_045512.2 | 3′→5′ | 10485 | 10502 |
| 3242 | AAACCAACACTACCACAT | NC_045512.2 | 3′→5′ | 10486 | 10503 |
| 3243 | AAAACCAACACTACCACA | NC_045512.2 | 3′→5′ | 10487 | 10504 |
| 3244 | TAAAACCAACACTACCAC | NC_045512.2 | 3′→5′ | 10488 | 10505 |
| 3245 | TTAAAACCAACACTACCA | NC_045512.2 | 3′→5′ | 10489 | 10506 |
| 3246 | GTTAAAACCAACACTACC | NC_045512.2 | 3′→5′ | 10490 | 10507 |
| 3247 | TGTTAAAACCAACACTAC | NC_045512.2 | 3′→5′ | 10491 | 10508 |
| 3248 | ATGTTAAAACCAACACTA | NC_045512.2 | 3′→5′ | 10492 | 10509 |
| 3249 | GCCTAAGAAACAATAAAC | NC_045512.2 | 3′→5′ | 11609 | 11626 |
| 3250 | AGCCTAAGAAACAATAAA | NC_045512.2 | 3′→5′ | 11610 | 11627 |
| 3251 | TAGCCTAAGAAACAATAA | NC_045512.2 | 3′→5′ | 11611 | 11628 |
| 3252 | ATAGCCTAAGAAACAATA | NC_045512.2 | 3′→5′ | 11612 | 11629 |
| 3253 | AATAGCCTAAGAAACAAT | NC_045512.2 | 3′→5′ | 11613 | 11630 |
| 3254 | CATTTTAGACTGTACAGT | NC_045512.2 | 3′→5′ | 11834 | 11851 |
| 3255 | ACATTTTAGACTGTACAG | NC_045512.2 | 3′→5′ | 11835 | 11852 |
| 3256 | GACATTTTAGACTGTACA | NC_045512.2 | 3′→5′ | 11836 | 11853 |
| 3257 | TACAGCACCCTGCATGGA | NC_045512.2 | 3′→5′ | 12023 | 12040 |
| 3258 | CTACAGCACCCTGCATGG | NC_045512.2 | 3′→5′ | 12024 | 12041 |
| 3259 | TCTACAGCACCCTGCATG | NC_045512.2 | 3′→5′ | 12025 | 12042 |
| 3260 | GTCTACAGCACCCTGCAT | NC_045512.2 | 3′→5′ | 12026 | 12043 |
| 3261 | TGTCTACAGCACCCTGCA | NC_045512.2 | 3′→5′ | 12027 | 12044 |
| 3262 | ATGTCTACAGCACCCTGC | NC_045512.2 | 3′→5′ | 12028 | 12045 |
| 3263 | TTTAGCCACATTCAAAGA | NC_045512.2 | 3′→5′ | 12212 | 12229 |
| 3264 | ATTTAGCCACATTCAAAG | NC_045512.2 | 3′→5′ | 12213 | 12230 |
| 3265 | GATTTAGCCACATTCAAA | NC_045512.2 | 3′→5′ | 12214 | 12231 |
| 3266 | AGATTTAGCCACATTCAA | NC_045512.2 | 3′→5′ | 12215 | 12232 |
| 3267 | CAGATTTAGCCACATTCA | NC_045512.2 | 3′→5′ | 12216 | 12233 |
| 3268 | TCAGATTTAGCCACATTC | NC_045512.2 | 3′→5′ | 12217 | 12234 |
| 3269 | ATTGTTGATAATGTTGTT | NC_045512.2 | 3′→5′ | 12401 | 12418 |
| 3270 | CATTGTTGATAATGTTGT | NC_045512.2 | 3′→5′ | 12402 | 12419 |
| 3271 | GCATTGTTGATAATGTTG | NC_045512.2 | 3′→5′ | 12403 | 12420 |
| 3272 | AGGGAATCTAGCCCATTT | NC_045512.2 | 3′→5′ | 12839 | 12856 |
| 3273 | TAGGGAATCTAGCCCATT | NC_045512.2 | 3′→5′ | 12840 | 12857 |
| 3274 | TTAGGGAATCTAGCCCAT | NC_045512.2 | 3′→5′ | 12841 | 12858 |
| 3275 | CTTAGGGAATCTAGCCCA | NC_045512.2 | 3′→5′ | 12842 | 12859 |
| 3276 | TCTTAGGGAATCTAGCCC | NC_045512.2 | 3′→5′ | 12843 | 12860 |
| 3277 | CTCTTAGGGAATCTAGCC | NC_045512.2 | 3′→5′ | 12844 | 12861 |
| 3278 | ACTCTTAGGGAATCTAGC | NC_045512.2 | 3′→5′ | 12845 | 12862 |
| 3279 | CACTCTTAGGGAATCTAG | NC_045512.2 | 3′→5′ | 12846 | 12863 |
| 3280 | TCACTCTTAGGGAATCTA | NC_045512.2 | 3′→5′ | 12847 | 12864 |
| 3281 | ATCACTCTTAGGGAATCT | NC_045512.2 | 3′→5′ | 12848 | 12865 |
| 3282 | CATCACTCTTAGGGAATC | NC_045512.2 | 3′→5′ | 12849 | 12866 |
| 3283 | CCATCACTCTTAGGGAAT | NC_045512.2 | 3′→5′ | 12850 | 12867 |
| 3284 | AAGGTGGTTCCAGTTCTG | NC_045512.2 | 3′→5′ | 12885 | 12902 |
| 3285 | CAAGGTGGTTCCAGTTCT | NC_045512.2 | 3′→5′ | 12886 | 12903 |
| 3286 | ACAAGGTGGTTCCAGTTC | NC_045512.2 | 3′→5′ | 12887 | 12904 |
| 3287 | TACAAGGTGGTTCCAGTT | NC_045512.2 | 3′→5′ | 12888 | 12905 |
| 3288 | CTACAAGGTGGTTCCAGT | NC_045512.2 | 3′→5′ | 12889 | 12906 |
| 3289 | CCTACAAGGTGGTTCCAG | NC_045512.2 | 3′→5′ | 12890 | 12907 |
| 3290 | ACCTACAAGGTGGTTCCA | NC_045512.2 | 3′→5′ | 12891 | 12908 |
| 3291 | AACCTACAAGGTGGTTCC | NC_045512.2 | 3′→5′ | 12892 | 12909 |
| 3292 | AAACCTACAAGGTGGTTC | NC_045512.2 | 3′→5′ | 12893 | 12910 |
| 3293 | CAAACCTACAAGGTGGTT | NC_045512.2 | 3′→5′ | 12894 | 12911 |
| 3294 | ACAAACCTACAAGGTGGT | NC_045512.2 | 3′→5′ | 12895 | 12912 |
| 3295 | AACAAACCTACAAGGTGG | NC_045512.2 | 3′→5′ | 12896 | 12913 |
| 3296 | TAACAAACCTACAAGGTG | NC_045512.2 | 3′→5′ | 12897 | 12914 |
| 3297 | GTAACAAACCTACAAGGT | NC_045512.2 | 3′→5′ | 12898 | 12915 |
| 3298 | TGTAACAAACCTACAAGG | NC_045512.2 | 3′→5′ | 12899 | 12916 |
| 3299 | CTGTAACAAACCTACAAG | NC_045512.2 | 3′→5′ | 12900 | 12917 |
| 3300 | TCTGTAACAAACCTACAA | NC_045512.2 | 3′→5′ | 12901 | 12918 |
| 3301 | GTCTGTAACAAACCTACA | NC_045512.2 | 3′→5′ | 12902 | 12919 |
| 3302 | TGTCTGTAACAAACCTAC | NC_045512.2 | 3′→5′ | 12903 | 12920 |
| 3303 | GTGTCTGTAACAAACCTA | NC_045512.2 | 3′→5′ | 12904 | 12921 |
| 3304 | TGTGTCTGTAACAAACCT | NC_045512.2 | 3′→5′ | 12905 | 12922 |
| 3305 | GTGTGTCTGTAACAAACC | NC_045512.2 | 3′→5′ | 12906 | 12923 |
| 3306 | GGTGTGTCTGTAACAAAC | NC_045512.2 | 3′→5′ | 12907 | 12924 |
| 3307 | CTCTATTTAGGTTGTTTA | NC_045512.2 | 3′→5′ | 12966 | 12983 |
| 3308 | CCTCTATTTAGGTTGTTT | NC_045512.2 | 3′→5′ | 12967 | 12984 |
| 3309 | ACCTCTATTTAGGTTGTT | NC_045512.2 | 3′→5′ | 12968 | 12985 |
| 3310 | TACCTCTATTTAGGTTGT | NC_045512.2 | 3′→5′ | 12969 | 12986 |
| 3311 | ATACCTCTATTTAGGTTG | NC_045512.2 | 3′→5′ | 12970 | 12987 |
| 3312 | CATACCTCTATTTAGGTT | NC_045512.2 | 3′→5′ | 12971 | 12988 |
| 3313 | CCATACCTCTATTTAGGT | NC_045512.2 | 3′→5′ | 12972 | 12989 |
| 3314 | ACCATACCTCTATTTAGG | NC_045512.2 | 3′→5′ | 12973 | 12990 |
| 3315 | GTGTGTACACAACATCTT | NC_045512.2 | 3′→5′ | 13151 | 13168 |
| 3316 | TGTGTGTACACAACATCT | NC_045512.2 | 3′→5′ | 13152 | 13169 |
| 3317 | GTGTGTGTACACAACATC | NC_045512.2 | 3′→5′ | 13153 | 13170 |
| 3318 | AGTGTGTGTACACAACAT | NC_045512.2 | 3′→5′ | 13154 | 13171 |
| 3319 | CAGTGTGTGTACACAACA | NC_045512.2 | 3′→5′ | 13155 | 13172 |
| 3320 | CCAGTGTGTGTACACAAC | NC_045512.2 | 3′→5′ | 13156 | 13173 |
| 3321 | ACCAGTGTGTGTACACAA | NC_045512.2 | 3′→5′ | 13157 | 13174 |
| 3322 | TACCAGTGTGTGTACACA | NC_045512.2 | 3′→5′ | 13158 | 13175 |
| 3323 | GTACCAGTGTGTGTACAC | NC_045512.2 | 3′→5′ | 13159 | 13176 |
| 3324 | ACGGTACAGACTGTGTTT | NC_045512.2 | 3′→5′ | 13363 | 13380 |
| 3325 | GACGGTACAGACTGTGTT | NC_045512.2 | 3′→5′ | 13364 | 13381 |
| 3326 | AGACGGTACAGACTGTGT | NC_045512.2 | 3′→5′ | 13365 | 13382 |
| 3327 | CAGACGGTACAGACTGTG | NC_045512.2 | 3′→5′ | 13366 | 13383 |
| 3328 | GCAGACGGTACAGACTGT | NC_045512.2 | 3′→5′ | 13367 | 13384 |
| 3329 | CGCAGACGGTACAGACTG | NC_045512.2 | 3′→5′ | 13368 | 13385 |
| 3330 | CCGCAGACGGTACAGACT | NC_045512.2 | 3′→5′ | 13369 | 13386 |
| 3331 | GCCATAACCTTTCCACAT | NC_045512.2 | 3′→5′ | 13388 | 13405 |
| 3332 | AGCCATAACCTTTCCACA | NC_045512.2 | 3′→5′ | 13389 | 13406 |
| 3333 | CAGCCATAACCTTTCCAC | NC_045512.2 | 3′→5′ | 13390 | 13407 |
| 3334 | ACAGCCATAACCTTTCCA | NC_045512.2 | 3′→5′ | 13391 | 13408 |
| 3335 | TACAGCCATAACCTTTCC | NC_045512.2 | 3′→5′ | 13392 | 13409 |
| 3336 | CTACAGCCATAACCTTTC | NC_045512.2 | 3′→5′ | 13393 | 13410 |
| 3337 | ACTACAGCCATAACCTTT | NC_045512.2 | 3′→5′ | 13394 | 13411 |
| 3338 | AACTACAGCCATAACCTT | NC_045512.2 | 3′→5′ | 13395 | 13412 |
| 3339 | CAACTACAGCCATAACCT | NC_045512.2 | 3′→5′ | 13396 | 13413 |
| 3340 | ACAACTACAGCCATAACC | NC_045512.2 | 3′→5′ | 13397 | 13414 |
| 3341 | CACAACTACAGCCATAAC | NC_045512.2 | 3′→5′ | 13398 | 13415 |
| 3342 | TCACAACTACAGCCATAA | NC_045512.2 | 3′→5′ | 13399 | 13416 |
| 3343 | CAAACCCGTTTAAAAACG | NC_045512.2 | 3′→5′ | 13458 | 13475 |
| 3344 | GCAAACCCGTTTAAAAAC | NC_045512.2 | 3′→5′ | 13459 | 13476 |
| 3345 | CGCAAACCCGTTTAAAAA | NC_045512.2 | 3′→5′ | 13460 | 13477 |
| 3346 | CCGCAAACCCGTTTAAAA | NC_045512.2 | 3′→5′ | 13461 | 13478 |
| 3347 | ACCGCAAACCCGTTTAAA | NC_045512.2 | 3′→5′ | 13462 | 13479 |
| 3348 | CACCGCAAACCCGTTTAA | NC_045512.2 | 3′→5′ | 13463 | 13480 |
| 3349 | ACACCGCAAACCCGTTTA | NC_045512.2 | 3′→5′ | 13464 | 13481 |
| 3350 | TACACCGCAAACCCGTTT | NC_045512.2 | 3′→5′ | 13465 | 13482 |
| 3351 | TTACACCGCAAACCCGTT | NC_045512.2 | 3′→5′ | 13466 | 13483 |
| 3352 | CTTACACCGCAAACCCGT | NC_045512.2 | 3′→5′ | 13467 | 13484 |
| 3353 | ACTTACACCGCAAACCCG | NC_045512.2 | 3′→5′ | 13468 | 13485 |
| 3354 | CACTTACACCGCAAACCC | NC_045512.2 | 3′→5′ | 13469 | 13486 |
| 3355 | GCACTTACACCGCAAACC | NC_045512.2 | 3′→5′ | 13470 | 13487 |
| 3356 | TGCACTTACACCGCAAAC | NC_045512.2 | 3′→5′ | 13471 | 13488 |
| 3357 | CTGCACTTACACCGCAAA | NC_045512.2 | 3′→5′ | 13472 | 13489 |
| 3358 | GCTGCACTTACACCGCAA | NC_045512.2 | 3′→5′ | 13473 | 13490 |
| 3359 | GGCTGCACTTACACCGCA | NC_045512.2 | 3′→5′ | 13474 | 13491 |
| 3360 | GGGCTGCACTTACACCGC | NC_045512.2 | 3′→5′ | 13475 | 13492 |
| 3361 | CGGGCTGCACTTACACCG | NC_045512.2 | 3′→5′ | 13476 | 13493 |
| 3362 | ACGGGCTGCACTTACACC | NC_045512.2 | 3′→5′ | 13477 | 13494 |
| 3363 | GACGGGCTGCACTTACAC | NC_045512.2 | 3′→5′ | 13478 | 13495 |
| 3364 | AGACGGGCTGCACTTACA | NC_045512.2 | 3′→5′ | 13479 | 13496 |
| 3365 | AAGACGGGCTGCACTTAC | NC_045512.2 | 3′→5′ | 13480 | 13497 |
| 3366 | TAAGACGGGCTGCACTTA | NC_045512.2 | 3′→5′ | 13481 | 13498 |
| 3367 | GTAAGACGGGCTGCACTT | NC_045512.2 | 3′→5′ | 13482 | 13499 |
| 3368 | TGTAAGACGGGCTGCACT | NC_045512.2 | 3′→5′ | 13483 | 13500 |
| 3369 | GTGTAAGACGGGCTGCAC | NC_045512.2 | 3′→5′ | 13484 | 13501 |
| 3370 | GGTGTAAGACGGGCTGCA | NC_045512.2 | 3′→5′ | 13485 | 13502 |
| 3371 | CGGTGTAAGACGGGCTGC | NC_045512.2 | 3′→5′ | 13486 | 13503 |
| 3372 | ACGGTGTAAGACGGGCTG | NC_045512.2 | 3′→5′ | 13487 | 13504 |
| 3373 | CACGGTGTAAGACGGGCT | NC_045512.2 | 3′→5′ | 13488 | 13505 |
| 3374 | GCACGGTGTAAGACGGGC | NC_045512.2 | 3′→5′ | 13489 | 13506 |
| 3375 | CGCACGGTGTAAGACGGG | NC_045512.2 | 3′→5′ | 13490 | 13507 |
| 3376 | CCGCACGGTGTAAGACGG | NC_045512.2 | 3′→5′ | 13491 | 13508 |
| 3377 | GCCGCACGGTGTAAGACG | NC_045512.2 | 3′→5′ | 13492 | 13509 |
| 3378 | TGCCGCACGGTGTAAGAC | NC_045512.2 | 3′→5′ | 13493 | 13510 |
| 3379 | GTGCCGCACGGTGTAAGA | NC_045512.2 | 3′→5′ | 13494 | 13511 |
| 3380 | TGTGCCGCACGGTGTAAG | NC_045512.2 | 3′→5′ | 13495 | 13512 |
| 3381 | CTGTGCCGCACGGTGTAA | NC_045512.2 | 3′→5′ | 13496 | 13513 |
| 3382 | CCTGTGCCGCACGGTGTA | NC_045512.2 | 3′→5′ | 13497 | 13514 |
| 3383 | GCCTGTGCCGCACGGTGT | NC_045512.2 | 3′→5′ | 13498 | 13515 |
| 3384 | TGCCTGTGCCGCACGGTG | NC_045512.2 | 3′→5′ | 13499 | 13516 |
| 3385 | GTGCCTGTGCCGCACGGT | NC_045512.2 | 3′→5′ | 13500 | 13517 |
| 3386 | AGTGCCTGTGCCGCACGG | NC_045512.2 | 3′→5′ | 13501 | 13518 |
| 3387 | TAGTGCCTGTGCCGCACG | NC_045512.2 | 3′→5′ | 13502 | 13519 |
| 3388 | CTAGTGCCTGTGCCGCAC | NC_045512.2 | 3′→5′ | 13503 | 13520 |
| 3389 | ATGTGGTACCATGTCACC | NC_045512.2 | 3′→5′ | 13762 | 13779 |
| 3390 | TATGTGGTACCATGTCAC | NC_045512.2 | 3′→5′ | 13763 | 13780 |
| 3391 | ATATGTGGTACCATGTCA | NC_045512.2 | 3′→5′ | 13764 | 13781 |
| 3392 | TATATGTGGTACCATGTC | NC_045512.2 | 3′→5′ | 13765 | 13782 |
| 3393 | ATATATGTGGTACCATGT | NC_045512.2 | 3′→5′ | 13766 | 13783 |
| 3394 | GATATATGTGGTACCATG | NC_045512.2 | 3′→5′ | 13767 | 13784 |
| 3395 | TGATATATGTGGTACCAT | NC_045512.2 | 3′→5′ | 13768 | 13785 |
| 3396 | GTGATATATGTGGTACCA | NC_045512.2 | 3′→5′ | 13769 | 13786 |
| 3397 | CGTGATATATGTGGTACC | NC_045512.2 | 3′→5′ | 13770 | 13787 |
| 3398 | ACGTGATATATGTGGTAC | NC_045512.2 | 3′→5′ | 13771 | 13788 |
| 3399 | GACGTGATATATGTGGTA | NC_045512.2 | 3′→5′ | 13772 | 13789 |
| 3400 | TGACGTGATATATGTGGT | NC_045512.2 | 3′→5′ | 13773 | 13790 |
| 3401 | ATATTTAAAATAACGGTC | NC_045512.2 | 3′→5′ | 14290 | 14307 |
| 3402 | AATATTTAAAATAACGGT | NC_045512.2 | 3′→5′ | 14291 | 14308 |
| 3403 | CAATATTTAAAATAACGG | NC_045512.2 | 3′→5′ | 14292 | 14309 |
| 3404 | CCAATATTTAAAATAACG | NC_045512.2 | 3′→5′ | 14293 | 14310 |
| 3405 | CCCAATATTTAAAATAAC | NC_045512.2 | 3′→5′ | 14294 | 14311 |
| 3406 | TCCCAATATTTAAAATAA | NC_045512.2 | 3′→5′ | 14295 | 14312 |
| 3407 | TCCAAAACTTGTAGGTGG | NC_045512.2 | 3′→5′ | 14404 | 14421 |
| 3408 | GTCCAAAACTTGTAGGTG | NC_045512.2 | 3′→5′ | 14405 | 14422 |
| 3409 | GGTCCAAAACTTGTAGGT | NC_045512.2 | 3′→5′ | 14406 | 14423 |
| 3410 | TGGTCCAAAACTTGTAGG | NC_045512.2 | 3′→5′ | 14407 | 14424 |
| 3411 | GTGGTCCAAAACTTGTAG | NC_045512.2 | 3′→5′ | 14408 | 14425 |
| 3412 | AGTGGTCCAAAACTTGTA | NC_045512.2 | 3′→5′ | 14409 | 14426 |
| 3413 | TAGTGGTCCAAAACTTGT | NC_045512.2 | 3′→5′ | 14410 | 14427 |
| 3414 | CTAGTGGTCCAAAACTTG | NC_045512.2 | 3′→5′ | 14411 | 14428 |
| 3415 | ACTAGTGGTCCAAAACTT | NC_045512.2 | 3′→5′ | 14412 | 14429 |
| 3416 | TACATCCTGATTATGTAC | NC_045512.2 | 3′→5′ | 14500 | 14517 |
| 3417 | TTACATCCTGATTATGTA | NC_045512.2 | 3′→5′ | 14501 | 14518 |
| 3418 | TTTACATCCTGATTATGT | NC_045512.2 | 3′→5′ | 14502 | 14519 |
| 3419 | GTTTACATCCTGATTATG | NC_045512.2 | 3′→5′ | 14503 | 14520 |
| 3420 | AGTTTACATCCTGATTAT | NC_045512.2 | 3′→5′ | 14504 | 14521 |
| 3421 | AAGTTTACATCCTGATTA | NC_045512.2 | 3′→5′ | 14505 | 14522 |
| 3422 | TAAGTTTACATCCTGATT | NC_045512.2 | 3′→5′ | 14506 | 14523 |
| 3423 | GTAAGTTTACATCCTGAT | NC_045512.2 | 3′→5′ | 14507 | 14524 |
| 3424 | TGTAAGTTTACATCCTGA | NC_045512.2 | 3′→5′ | 14508 | 14525 |
| 3425 | ATGTAAGTTTACATCCTG | NC_045512.2 | 3′→5′ | 14509 | 14526 |
| 3426 | TATGTAAGTTTACATCCT | NC_045512.2 | 3′→5′ | 14510 | 14527 |
| 3427 | CTATGTAAGTTTACATCC | NC_045512.2 | 3′→5′ | 14511 | 14528 |
| 3428 | GCTATGTAAGTTTACATC | NC_045512.2 | 3′→5′ | 14512 | 14529 |
| 3429 | AGCTATGTAAGTTTACAT | NC_045512.2 | 3′→5′ | 14513 | 14530 |
| 3430 | GAGCTATGTAAGTTTACA | NC_045512.2 | 3′→5′ | 14514 | 14531 |
| 3431 | TGCAGCTACTGAAAAGCA | NC_045512.2 | 3′→5′ | 14623 | 14640 |
| 3432 | GTGCAGCTACTGAAAAGC | NC_045512.2 | 3′→5′ | 14624 | 14641 |
| 3433 | AGTGCAGCTACTGAAAAG | NC_045512.2 | 3′→5′ | 14625 | 14642 |
| 3434 | AGTTTGAAAAGCAACATT | NC_045512.2 | 3′→5′ | 14650 | 14667 |
| 3435 | CAGTTTGAAAAGCAACAT | NC_045512.2 | 3′→5′ | 14651 | 14668 |
| 3436 | ACAGTTTGAAAAGCAACA | NC_045512.2 | 3′→5′ | 14652 | 14669 |
| 3437 | GACAGTTTGAAAAGCAAC | NC_045512.2 | 3′→5′ | 14653 | 14670 |
| 3438 | TGACAGTTTGAAAAGCAA | NC_045512.2 | 3′→5′ | 14654 | 14671 |
| 3439 | TTGACAGTTTGAAAAGCA | NC_045512.2 | 3′→5′ | 14655 | 14672 |
| 3440 | TTTGACAGTTTGAAAAGC | NC_045512.2 | 3′→5′ | 14656 | 14673 |
| 3441 | GTTTGACAGTTTGAAAAG | NC_045512.2 | 3′→5′ | 14657 | 14674 |
| 3442 | GGTTTGACAGTTTGAAAA | NC_045512.2 | 3′→5′ | 14658 | 14675 |
| 3443 | GGGTTTGACAGTTTGAAA | NC_045512.2 | 3′→5′ | 14659 | 14676 |
| 3444 | CGGGTTTGACAGTTTGAA | NC_045512.2 | 3′→5′ | 14660 | 14677 |
| 3445 | CCGGGTTTGACAGTTTGA | NC_045512.2 | 3′→5′ | 14661 | 14678 |
| 3446 | ACCGGGTTTGACAGTTTG | NC_045512.2 | 3′→5′ | 14662 | 14679 |
| 3447 | TACCGGGTTTGACAGTTT | NC_045512.2 | 3′→5′ | 14663 | 14680 |
| 3448 | TTACCGGGTTTGACAGTT | NC_045512.2 | 3′→5′ | 14664 | 14681 |
| 3449 | ATTACCGGGTTTGACAGT | NC_045512.2 | 3′→5′ | 14665 | 14682 |
| 3450 | AATTACCGGGTTTGACAG | NC_045512.2 | 3′→5′ | 14666 | 14683 |
| 3451 | AAATTACCGGGTTTGACA | NC_045512.2 | 3′→5′ | 14667 | 14684 |
| 3452 | AAAATTACCGGGTTTGAC | NC_045512.2 | 3′→5′ | 14668 | 14685 |
| 3453 | TAAAATTACCGGGTTTGA | NC_045512.2 | 3′→5′ | 14669 | 14686 |
| 3454 | TTAAAATTACCGGGTTTG | NC_045512.2 | 3′→5′ | 14670 | 14687 |
| 3455 | AGACACAGCAAAGTCATA | NC_045512.2 | 3′→5′ | 14698 | 14715 |
| 3456 | TAGACACAGCAAAGTCAT | NC_045512.2 | 3′→5′ | 14699 | 14716 |
| 3457 | TTAGACACAGCAAAGTCA | NC_045512.2 | 3′→5′ | 14700 | 14717 |
| 3458 | ACTTCCTTCCTTAAAGAA | NC_045512.2 | 3′→5′ | 14722 | 14739 |
| 3459 | AACTTCCTTCCTTAAAGA | NC_045512.2 | 3′→5′ | 14723 | 14740 |
| 3460 | GAACTTCCTTCCTTAAAG | NC_045512.2 | 3′→5′ | 14724 | 14741 |
| 3461 | AGAACTTCCTTCCTTAAA | NC_045512.2 | 3′→5′ | 14725 | 14742 |
| 3462 | CAGAACTTCCTTCCTTAA | NC_045512.2 | 3′→5′ | 14726 | 14743 |
| 3463 | ACAGAACTTCCTTCCTTA | NC_045512.2 | 3′→5′ | 14727 | 14744 |
| 3464 | AACAGAACTTCCTTCCTT | NC_045512.2 | 3′→5′ | 14728 | 14745 |
| 3465 | CAACAGAACTTCCTTCCT | NC_045512.2 | 3′→5′ | 14729 | 14746 |
| 3466 | TCAACAGAACTTCCTTCC | NC_045512.2 | 3′→5′ | 14730 | 14747 |
| 3467 | TTCAACAGAACTTCCTTC | NC_045512.2 | 3′→5′ | 14731 | 14748 |
| 3468 | CAAAGAAGAAGTGTTTTA | NC_045512.2 | 3′→5′ | 14750 | 14767 |
| 3469 | GCAAAGAAGAAGTGTTTT | NC_045512.2 | 3′→5′ | 14751 | 14768 |
| 3470 | AGCAAAGAAGAAGTGTTT | NC_045512.2 | 3′→5′ | 14752 | 14769 |
| 3471 | GAGCAAAGAAGAAGTGTT | NC_045512.2 | 3′→5′ | 14753 | 14770 |
| 3472 | TGAGCAAAGAAGAAGTGT | NC_045512.2 | 3′→5′ | 14754 | 14771 |
| 3473 | CTGAGCAAAGAAGAAGTG | NC_045512.2 | 3′→5′ | 14755 | 14772 |
| 3474 | CCTGAGCAAAGAAGAAGT | NC_045512.2 | 3′→5′ | 14756 | 14773 |
| 3475 | TCCTGAGCAAAGAAGAAG | NC_045512.2 | 3′→5′ | 14757 | 14774 |
| 3476 | ATCCTGAGCAAAGAAGAA | NC_045512.2 | 3′→5′ | 14758 | 14775 |
| 3477 | CATCCTGAGCAAAGAAGA | NC_045512.2 | 3′→5′ | 14759 | 14776 |
| 3478 | CCATCCTGAGCAAAGAAG | NC_045512.2 | 3′→5′ | 14760 | 14777 |
| 3479 | GATATCACACATTGTTGG | NC_045512.2 | 3′→5′ | 14821 | 14838 |
| 3480 | TGATATCACACATTGTTG | NC_045512.2 | 3′→5′ | 14822 | 14839 |
| 3481 | CTGATATCACACATTGTT | NC_045512.2 | 3′→5′ | 14823 | 14840 |
| 3482 | TCTGATATCACACATTGT | NC_045512.2 | 3′→5′ | 14824 | 14841 |
| 3483 | GTCTGATATCACACATTG | NC_045512.2 | 3′→5′ | 14825 | 14842 |
| 3484 | TGTCTGATATCACACATT | NC_045512.2 | 3′→5′ | 14826 | 14843 |
| 3485 | TTGTCTGATATCACACAT | NC_045512.2 | 3′→5′ | 14827 | 14844 |
| 3486 | GTTGTCTGATATCACACA | NC_045512.2 | 3′→5′ | 14828 | 14845 |
| 3487 | AGTTGTCTGATATCACAC | NC_045512.2 | 3′→5′ | 14829 | 14846 |
| 3488 | ATCAACAACTTCAACTAC | NC_045512.2 | 3′→5′ | 14854 | 14871 |
| 3489 | TATCAACAACTTCAACTA | NC_045512.2 | 3′→5′ | 14855 | 14872 |
| 3490 | TTATCAACAACTTCAACT | NC_045512.2 | 3′→5′ | 14856 | 14873 |
| 3491 | ATCGTAACAATCAAAGTA | NC_045512.2 | 3′→5′ | 14875 | 14892 |
| 3492 | CATCGTAACAATCAAAGT | NC_045512.2 | 3′→5′ | 14876 | 14893 |
| 3493 | CCATCGTAACAATCAAAG | NC_045512.2 | 3′→5′ | 14877 | 14894 |
| 3494 | ACCATCGTAACAATCAAA | NC_045512.2 | 3′→5′ | 14878 | 14895 |
| 3495 | CACCATCGTAACAATCAA | NC_045512.2 | 3′→5′ | 14879 | 14896 |
| 3496 | CCACCATCGTAACAATCA | NC_045512.2 | 3′→5′ | 14880 | 14897 |
| 3497 | GCCACCATCGTAACAATC | NC_045512.2 | 3′→5′ | 14881 | 14898 |
| 3498 | AGCCACCATCGTAACAAT | NC_045512.2 | 3′→5′ | 14882 | 14899 |
| 3499 | CAGCCACCATCGTAACAA | NC_045512.2 | 3′→5′ | 14883 | 14900 |
| 3500 | ACAGCCACCATCGTAACA | NC_045512.2 | 3′→5′ | 14884 | 14901 |
| 3501 | TACAGCCACCATCGTAAC | NC_045512.2 | 3′→5′ | 14885 | 14902 |
| 3502 | ATACAGCCACCATCGTAA | NC_045512.2 | 3′→5′ | 14886 | 14903 |
| 3503 | TCTAGCCTTACCCCATTT | NC_045512.2 | 3′→5′ | 14962 | 14979 |
| 3504 | GTCTAGCCTTACCCCATT | NC_045512.2 | 3′→5′ | 14963 | 14980 |
| 3505 | AGTCTAGCCTTACCCCAT | NC_045512.2 | 3′→5′ | 14964 | 14981 |
| 3506 | AAGTCTAGCCTTACCCCA | NC_045512.2 | 3′→5′ | 14965 | 14982 |
| 3507 | AAAGTCTAGCCTTACCCC | NC_045512.2 | 3′→5′ | 14966 | 14983 |
| 3508 | TAAAGTCTAGCCTTACCC | NC_045512.2 | 3′→5′ | 14967 | 14984 |
| 3509 | ATAAAGTCTAGCCTTACC | NC_045512.2 | 3′→5′ | 14968 | 14985 |
| 3510 | AATAAAGTCTAGCCTTAC | NC_045512.2 | 3′→5′ | 14969 | 14986 |
| 3511 | TAATAAAGTCTAGCCTTA | NC_045512.2 | 3′→5′ | 14970 | 14987 |
| 3512 | ATAATAAAGTCTAGCCTT | NC_045512.2 | 3′→5′ | 14971 | 14988 |
| 3513 | CATAATAAAGTCTAGCCT | NC_045512.2 | 3′→5′ | 14972 | 14989 |
| 3514 | TCATAATAAAGTCTAGCC | NC_045512.2 | 3′→5′ | 14973 | 14990 |
| 3515 | ATCCTCATAACTCATTGA | NC_045512.2 | 3′→5′ | 14992 | 15009 |
| 3516 | GATCCTCATAACTCATTG | NC_045512.2 | 3′→5′ | 14993 | 15010 |
| 3517 | TGATCCTCATAACTCATT | NC_045512.2 | 3′→5′ | 14994 | 15011 |
| 3518 | TTGATCCTCATAACTCAT | NC_045512.2 | 3′→5′ | 14995 | 15012 |
| 3519 | CTTGATCCTCATAACTCA | NC_045512.2 | 3′→5′ | 14996 | 15013 |
| 3520 | TCTTGATCCTCATAACTC | NC_045512.2 | 3′→5′ | 14997 | 15014 |
| 3521 | ATCTTGATCCTCATAACT | NC_045512.2 | 3′→5′ | 14998 | 15015 |
| 3522 | CATCTTGATCCTCATAAC | NC_045512.2 | 3′→5′ | 14999 | 15016 |
| 3523 | GCATCTTGATCCTCATAA | NC_045512.2 | 3′→5′ | 15000 | 15017 |
| 3524 | TGCATCTTGATCCTCATA | NC_045512.2 | 3′→5′ | 15001 | 15018 |
| 3525 | GTGCATCTTGATCCTCAT | NC_045512.2 | 3′→5′ | 15002 | 15019 |
| 3526 | AGTGCATCTTGATCCTCA | NC_045512.2 | 3′→5′ | 15003 | 15020 |
| 3527 | AAGATTCATTTGAGTTAT | NC_045512.2 | 3′→5′ | 15055 | 15072 |
| 3528 | TAAGATTCATTTGAGTTA | NC_045512.2 | 3′→5′ | 15056 | 15073 |
| 3529 | TTAAGATTCATTTGAGTT | NC_045512.2 | 3′→5′ | 15057 | 15074 |
| 3530 | CTTAAGATTCATTTGAGT | NC_045512.2 | 3′→5′ | 15058 | 15075 |
| 3531 | ACTTAAGATTCATTTGAG | NC_045512.2 | 3′→5′ | 15059 | 15076 |
| 3532 | TACTTAAGATTCATTTGA | NC_045512.2 | 3′→5′ | 15060 | 15077 |
| 3533 | ATACTTAAGATTCATTTG | NC_045512.2 | 3′→5′ | 15061 | 15078 |
| 3534 | CATACTTAAGATTCATTT | NC_045512.2 | 3′→5′ | 15062 | 15079 |
| 3535 | GCATACTTAAGATTCATT | NC_045512.2 | 3′→5′ | 15063 | 15080 |
| 3536 | GGCATACTTAAGATTCAT | NC_045512.2 | 3′→5′ | 15064 | 15081 |
| 3537 | TGGCATACTTAAGATTCA | NC_045512.2 | 3′→5′ | 15065 | 15082 |
| 3538 | ATGGCATACTTAAGATTC | NC_045512.2 | 3′→5′ | 15066 | 15083 |
| 3539 | AATGGCATACTTAAGATT | NC_045512.2 | 3′→5′ | 15067 | 15084 |
| 3540 | TAATGGCATACTTAAGAT | NC_045512.2 | 3′→5′ | 15068 | 15085 |
| 3541 | CTAATGGCATACTTAAGA | NC_045512.2 | 3′→5′ | 15069 | 15086 |
| 3542 | ACTAATGGCATACTTAAG | NC_045512.2 | 3′→5′ | 15070 | 15087 |
| 3543 | CACTAATGGCATACTTAA | NC_045512.2 | 3′→5′ | 15071 | 15088 |
| 3544 | GCACTAATGGCATACTTA | NC_045512.2 | 3′→5′ | 15072 | 15089 |
| 3545 | TGCACTAATGGCATACTT | NC_045512.2 | 3′→5′ | 15073 | 15090 |
| 3546 | TTGCACTAATGGCATACT | NC_045512.2 | 3′→5′ | 15074 | 15091 |
| 3547 | TTTGCACTAATGGCATAC | NC_045512.2 | 3′→5′ | 15075 | 15092 |
| 3548 | CTTTGCACTAATGGCATA | NC_045512.2 | 3′→5′ | 15076 | 15093 |
| 3549 | TCTTTGCACTAATGGCAT | NC_045512.2 | 3′→5′ | 15077 | 15094 |
| 3550 | TTCTTTGCACTAATGGCA | NC_045512.2 | 3′→5′ | 15078 | 15095 |
| 3551 | ATTCTTTGCACTAATGGC | NC_045512.2 | 3′→5′ | 15079 | 15096 |
| 3552 | TATTCTTTGCACTAATGG | NC_045512.2 | 3′→5′ | 15080 | 15097 |
| 3553 | CTATTCTTTGCACTAATG | NC_045512.2 | 3′→5′ | 15081 | 15098 |
| 3554 | TCTATTCTTTGCACTAAT | NC_045512.2 | 3′→5′ | 15082 | 15099 |
| 3555 | CTCTATTCTTTGCACTAA | NC_045512.2 | 3′→5′ | 15083 | 15100 |
| 3556 | GCTCTATTCTTTGCACTA | NC_045512.2 | 3′→5′ | 15084 | 15101 |
| 3557 | AGCTCTATTCTTTGCACT | NC_045512.2 | 3′→5′ | 15085 | 15102 |
| 3558 | GAGCTCTATTCTTTGCAC | NC_045512.2 | 3′→5′ | 15086 | 15103 |
| 3559 | CGAGCTCTATTCTTTGCA | NC_045512.2 | 3′→5′ | 15087 | 15104 |
| 3560 | GCGAGCTCTATTCTTTGC | NC_045512.2 | 3′→5′ | 15088 | 15105 |
| 3561 | TGCGAGCTCTATTCTTTG | NC_045512.2 | 3′→5′ | 15089 | 15106 |
| 3562 | GTGCGAGCTCTATTCTTT | NC_045512.2 | 3′→5′ | 15090 | 15107 |
| 3563 | GGTGCGAGCTCTATTCTT | NC_045512.2 | 3′→5′ | 15091 | 15108 |
| 3564 | CGGTGCGAGCTCTATTCT | NC_045512.2 | 3′→5′ | 15092 | 15109 |
| 3565 | ACGGTGCGAGCTCTATTC | NC_045512.2 | 3′→5′ | 15093 | 15110 |
| 3566 | TACGGTGCGAGCTCTATT | NC_045512.2 | 3′→5′ | 15094 | 15111 |
| 3567 | CTACGGTGCGAGCTCTAT | NC_045512.2 | 3′→5′ | 15095 | 15112 |
| 3568 | GCTACGGTGCGAGCTCTA | NC_045512.2 | 3′→5′ | 15096 | 15113 |
| 3569 | AGCTACGGTGCGAGCTCT | NC_045512.2 | 3′→5′ | 15097 | 15114 |
| 3570 | CAGCTACGGTGCGAGCTC | NC_045512.2 | 3′→5′ | 15098 | 15115 |
| 3571 | CCAGCTACGGTGCGAGCT | NC_045512.2 | 3′→5′ | 15099 | 15116 |
| 3572 | ACCAGCTACGGTGCGAGC | NC_045512.2 | 3′→5′ | 15100 | 15117 |
| 3573 | CACCAGCTACGGTGCGAG | NC_045512.2 | 3′→5′ | 15101 | 15118 |
| 3574 | ACACCAGCTACGGTGCGA | NC_045512.2 | 3′→5′ | 15102 | 15119 |
| 3575 | GACACCAGCTACGGTGCG | NC_045512.2 | 3′→5′ | 15103 | 15120 |
| 3576 | AGACACCAGCTACGGTGC | NC_045512.2 | 3′→5′ | 15104 | 15121 |
| 3577 | GAGACACCAGCTACGGTG | NC_045512.2 | 3′→5′ | 15105 | 15122 |
| 3578 | AGAGACACCAGCTACGGT | NC_045512.2 | 3′→5′ | 15106 | 15123 |
| 3579 | TAGAGACACCAGCTACGG | NC_045512.2 | 3′→5′ | 15107 | 15124 |
| 3580 | ATAGAGACACCAGCTACG | NC_045512.2 | 3′→5′ | 15108 | 15125 |
| 3581 | GATAGAGACACCAGCTAC | NC_045512.2 | 3′→5′ | 15109 | 15126 |
| 3582 | AGATAGAGACACCAGCTA | NC_045512.2 | 3′→5′ | 15110 | 15127 |
| 3583 | CAGATAGAGACACCAGCT | NC_045512.2 | 3′→5′ | 15111 | 15128 |
| 3584 | ACAGATAGAGACACCAGC | NC_045512.2 | 3′→5′ | 15112 | 15129 |
| 3585 | TACAGATAGAGACACCAG | NC_045512.2 | 3′→5′ | 15113 | 15130 |
| 3586 | CTACAGATAGAGACACCA | NC_045512.2 | 3′→5′ | 15114 | 15131 |
| 3587 | ACTACAGATAGAGACACC | NC_045512.2 | 3′→5′ | 15115 | 15132 |
| 3588 | TACTACAGATAGAGACAC | NC_045512.2 | 3′→5′ | 15116 | 15133 |
| 3589 | GTACTACAGATAGAGACA | NC_045512.2 | 3′→5′ | 15117 | 15134 |
| 3590 | AGTACTACAGATAGAGAC | NC_045512.2 | 3′→5′ | 15118 | 15135 |
| 3591 | TAGTACTACAGATAGAGA | NC_045512.2 | 3′→5′ | 15119 | 15136 |
| 3592 | ATAGTACTACAGATAGAG | NC_045512.2 | 3′→5′ | 15120 | 15137 |
| 3593 | CATAGTACTACAGATAGA | NC_045512.2 | 3′→5′ | 15121 | 15138 |
| 3594 | TCATAGTACTACAGATAG | NC_045512.2 | 3′→5′ | 15122 | 15139 |
| 3595 | GTCATAGTACTACAGATA | NC_045512.2 | 3′→5′ | 15123 | 15140 |
| 3596 | TCTAGTGGCGGCTATTGA | NC_045512.2 | 3′→5′ | 15172 | 15189 |
| 3597 | CTCTAGTGGCGGCTATTG | NC_045512.2 | 3′→5′ | 15173 | 15190 |
| 3598 | CCTCTAGTGGCGGCTATT | NC_045512.2 | 3′→5′ | 15174 | 15191 |
| 3599 | TCCTCTAGTGGCGGCTAT | NC_045512.2 | 3′→5′ | 15175 | 15192 |
| 3600 | CTCCTCTAGTGGCGGCTA | NC_045512.2 | 3′→5′ | 15176 | 15193 |
| 3601 | GCTCCTCTAGTGGCGGCT | NC_045512.2 | 3′→5′ | 15177 | 15194 |
| 3602 | AGCTCCTCTAGTGGCGGC | NC_045512.2 | 3′→5′ | 15178 | 15195 |
| 3603 | TAGCTCCTCTAGTGGCGG | NC_045512.2 | 3′→5′ | 15179 | 15196 |
| 3604 | GTAGCTCCTCTAGTGGCG | NC_045512.2 | 3′→5′ | 15180 | 15197 |
| 3605 | AGTAGCTCCTCTAGTGGC | NC_045512.2 | 3′→5′ | 15181 | 15198 |
| 3606 | CAGTAGCTCCTCTAGTGG | NC_045512.2 | 3′→5′ | 15182 | 15199 |
| 3607 | ACAGTAGCTCCTCTAGTG | NC_045512.2 | 3′→5′ | 15183 | 15200 |
| 3608 | CATGTTAGGCATGGCTCT | NC_045512.2 | 3′→5′ | 15310 | 15327 |
| 3609 | GCATGTTAGGCATGGCTC | NC_045512.2 | 3′→5′ | 15311 | 15328 |
| 3610 | AGCATGTTAGGCATGGCT | NC_045512.2 | 3′→5′ | 15312 | 15329 |
| 3611 | AAGCATGTTAGGCATGGC | NC_045512.2 | 3′→5′ | 15313 | 15330 |
| 3612 | TAAGCATGTTAGGCATGG | NC_045512.2 | 3′→5′ | 15314 | 15331 |
| 3613 | CTAAGCATGTTAGGCATG | NC_045512.2 | 3′→5′ | 15315 | 15332 |
| 3614 | TTTGCGAGCAAGAACAAG | NC_045512.2 | 3′→5′ | 15346 | 15363 |
| 3615 | GTTTGCGAGCAAGAACAA | NC_045512.2 | 3′→5′ | 15347 | 15364 |
| 3616 | TGTTTGCGAGCAAGAACA | NC_045512.2 | 3′→5′ | 15348 | 15365 |
| 3617 | ATGTTTGCGAGCAAGAAC | NC_045512.2 | 3′→5′ | 15349 | 15366 |
| 3618 | TATGTTTGCGAGCAAGAA | NC_045512.2 | 3′→5′ | 15350 | 15367 |
| 3619 | ATTAGCATAAGCAGTTGT | NC_045512.2 | 3′→5′ | 15496 | 15513 |
| 3620 | TATTAGCATAAGCAGTTG | NC_045512.2 | 3′→5′ | 15497 | 15514 |
| 3621 | CTATTAGCATAAGCAGTT | NC_045512.2 | 3′→5′ | 15498 | 15515 |
| 3622 | ACTATTAGCATAAGCAGT | NC_045512.2 | 3′→5′ | 15499 | 15516 |
| 3623 | CACTATTAGCATAAGCAG | NC_045512.2 | 3′→5′ | 15500 | 15517 |
| 3624 | ACACTATTAGCATAAGCA | NC_045512.2 | 3′→5′ | 15501 | 15518 |
| 3625 | TCTATAGAGACACTCATA | NC_045512.2 | 3′→5′ | 15622 | 15639 |
| 3626 | TTCTATAGAGACACTCAT | NC_045512.2 | 3′→5′ | 15623 | 15640 |
| 3627 | TTTCTATAGAGACACTCA | NC_045512.2 | 3′→5′ | 15624 | 15641 |
| 3628 | ATTTCTATAGAGACACTC | NC_045512.2 | 3′→5′ | 15625 | 15642 |
| 3629 | TATTTCTATAGAGACACT | NC_045512.2 | 3′→5′ | 15626 | 15643 |
| 3630 | CTATTTCTATAGAGACAC | NC_045512.2 | 3′→5′ | 15627 | 15644 |
| 3631 | AAGGTCAGTCTCAGTCCA | NC_045512.2 | 3′→5′ | 15838 | 15855 |
| 3632 | TAAGGTCAGTCTCAGTCC | NC_045512.2 | 3′→5′ | 15839 | 15856 |
| 3633 | GTAAGGTCAGTCTCAGTC | NC_045512.2 | 3′→5′ | 15840 | 15857 |
| 3634 | AGTAAGGTCAGTCTCAGT | NC_045512.2 | 3′→5′ | 15841 | 15858 |
| 3635 | TAGTAAGGTCAGTCTCAG | NC_045512.2 | 3′→5′ | 15842 | 15859 |
| 3636 | TTAGTAAGGTCAGTCTCA | NC_045512.2 | 3′→5′ | 15843 | 15860 |
| 3637 | TTTAGTAAGGTCAGTCTC | NC_045512.2 | 3′→5′ | 15844 | 15861 |
| 3638 | CTTTAGTAAGGTCAGTCT | NC_045512.2 | 3′→5′ | 15845 | 15862 |
| 3639 | CCTTTAGTAAGGTCAGTC | NC_045512.2 | 3′→5′ | 15846 | 15863 |
| 3640 | TCCTTTAGTAAGGTCAGT | NC_045512.2 | 3′→5′ | 15847 | 15864 |
| 3641 | GTCCTTTAGTAAGGTCAG | NC_045512.2 | 3′→5′ | 15848 | 15865 |
| 3642 | GGTCCTTTAGTAAGGTCA | NC_045512.2 | 3′→5′ | 15849 | 15866 |
| 3643 | AGGTCCTTTAGTAAGGTC | NC_045512.2 | 3′→5′ | 15850 | 15867 |
| 3644 | GAGGTCCTTTAGTAAGGT | NC_045512.2 | 3′→5′ | 15851 | 15868 |
| 3645 | TGAGGTCCTTTAGTAAGG | NC_045512.2 | 3′→5′ | 15852 | 15869 |
| 3646 | TTTAACTAGCATTGTATG | NC_045512.2 | 3′→5′ | 15886 | 15903 |
| 3647 | GTTTAACTAGCATTGTAT | NC_045512.2 | 3′→5′ | 15887 | 15904 |
| 3648 | TGTTTAACTAGCATTGTA | NC_045512.2 | 3′→5′ | 15888 | 15905 |
| 3649 | AAGTGTACCATCTGTTTT | NC_045512.2 | 3′→5′ | 15985 | 16002 |
| 3650 | TAAGTGTACCATCTGTTT | NC_045512.2 | 3′→5′ | 15986 | 16003 |
| 3651 | ATAAGTGTACCATCTGTT | NC_045512.2 | 3′→5′ | 15987 | 16004 |
| 3652 | CATAAGTGTACCATCTGT | NC_045512.2 | 3′→5′ | 15988 | 16005 |
| 3653 | TCATAAGTGTACCATCTG | NC_045512.2 | 3′→5′ | 15989 | 16006 |
| 3654 | ATCATAAGTGTACCATCT | NC_045512.2 | 3′→5′ | 15990 | 16007 |
| 3655 | AATCATAAGTGTACCATC | NC_045512.2 | 3′→5′ | 15991 | 16008 |
| 3656 | CAATCATAAGTGTACCAT | NC_045512.2 | 3′→5′ | 15992 | 16009 |
| 3657 | TCAATCATAAGTGTACCA | NC_045512.2 | 3′→5′ | 15993 | 16010 |
| 3658 | AGCATACTCCTGATTAGG | NC_045512.2 | 3′→5′ | 16057 | 16074 |
| 3659 | CAGCATACTCCTGATTAG | NC_045512.2 | 3′→5′ | 16058 | 16075 |
| 3660 | TCAGCATACTCCTGATTA | NC_045512.2 | 3′→5′ | 16059 | 16076 |
| 3661 | ATCAGCATACTCCTGATT | NC_045512.2 | 3′→5′ | 16060 | 16077 |
| 3662 | CATCAGCATACTCCTGAT | NC_045512.2 | 3′→5′ | 16061 | 16078 |
| 3663 | ACATCAGCATACTCCTGA | NC_045512.2 | 3′→5′ | 16062 | 16079 |
| 3664 | ATAAAACTCAGGTTCCCA | NC_045512.2 | 3′→5′ | 16186 | 16203 |
| 3665 | CATAAAACTCAGGTTCCC | NC_045512.2 | 3′→5′ | 16187 | 16204 |
| 3666 | TCATAAAACTCAGGTTCC | NC_045512.2 | 3′→5′ | 16188 | 16205 |
| 3667 | AATAGCTCATACCTCCTA | NC_045512.2 | 3′→5′ | 16430 | 16447 |
| 3668 | TAATAGCTCATACCTCCT | NC_045512.2 | 3′→5′ | 16431 | 16448 |
| 3669 | TTCAAAGGTGTACTCTCC | NC_045512.2 | 3′→5′ | 16822 | 16839 |
| 3670 | TTTCAAAGGTGTACTCTC | NC_045512.2 | 3′→5′ | 16823 | 16840 |
| 3671 | TTTTCAAAGGTGTACTCT | NC_045512.2 | 3′→5′ | 16824 | 16841 |
| 3672 | TTTTTCAAAGGTGTACTC | NC_045512.2 | 3′→5′ | 16825 | 16842 |
| 3673 | CTTTTTCAAAGGTGTACT | NC_045512.2 | 3′→5′ | 16826 | 16843 |
| 3674 | CCTTTTTCAAAGGTGTAC | NC_045512.2 | 3′→5′ | 16827 | 16844 |
| 3675 | ACCTTTTTCAAAGGTGTA | NC_045512.2 | 3′→5′ | 16828 | 16845 |
| 3676 | CACCTTTTTCAAAGGTGT | NC_045512.2 | 3′→5′ | 16829 | 16846 |
| 3677 | TCACCTTTTTCAAAGGTG | NC_045512.2 | 3′→5′ | 16830 | 16847 |
| 3678 | GTCACCTTTTTCAAAGGT | NC_045512.2 | 3′→5′ | 16831 | 16848 |
| 3679 | AGTCACCTTTTTCAAAGG | NC_045512.2 | 3′→5′ | 16832 | 16849 |
| 3680 | TAGTCACCTTTTTCAAAG | NC_045512.2 | 3′→5′ | 16833 | 16850 |
| 3681 | ATAGTCACCTTTTTCAAA | NC_045512.2 | 3′→5′ | 16834 | 16851 |
| 3682 | CATAGTCACCTTTTTCAA | NC_045512.2 | 3′→5′ | 16835 | 16852 |
| 3683 | CCATAGTCACCTTTTTCA | NC_045512.2 | 3′→5′ | 16836 | 16853 |
| 3684 | ACCATAGTCACCTTTTTC | NC_045512.2 | 3′→5′ | 16837 | 16854 |
| 3685 | CACCATAGTCACCTTTTT | NC_045512.2 | 3′→5′ | 16838 | 16855 |
| 3686 | TCACCATAGTCACCTTTT | NC_045512.2 | 3′→5′ | 16839 | 16856 |
| 3687 | ATCACCATAGTCACCTTT | NC_045512.2 | 3′→5′ | 16840 | 16857 |
| 3688 | CATCACCATAGTCACCTT | NC_045512.2 | 3′→5′ | 16841 | 16858 |
| 3689 | GCATCACCATAGTCACCT | NC_045512.2 | 3′→5′ | 16842 | 16859 |
| 3690 | AGCATCACCATAGTCACC | NC_045512.2 | 3′→5′ | 16843 | 16860 |
| 3691 | CAGCATCACCATAGTCAC | NC_045512.2 | 3′→5′ | 16844 | 16861 |
| 3692 | ACAGCATCACCATAGTCA | NC_045512.2 | 3′→5′ | 16845 | 16862 |
| 3693 | AACAGCATCACCATAGTC | NC_045512.2 | 3′→5′ | 16846 | 16863 |
| 3694 | CAACAGCATCACCATAGT | NC_045512.2 | 3′→5′ | 16847 | 16864 |
| 3695 | ACAACAGCATCACCATAG | NC_045512.2 | 3′→5′ | 16848 | 16865 |
| 3696 | GTGCTCTTGTGGCACTAG | NC_045512.2 | 3′→5′ | 16954 | 16971 |
| 3697 | AGTGCTCTTGTGGCACTA | NC_045512.2 | 3′→5′ | 16955 | 16972 |
| 3698 | TAGTGCTCTTGTGGCACT | NC_045512.2 | 3′→5′ | 16956 | 16973 |
| 3699 | ATAGTGCTCTTGTGGCAC | NC_045512.2 | 3′→5′ | 16957 | 16974 |
| 3700 | CATAGTGCTCTTGTGGCA | NC_045512.2 | 3′→5′ | 16958 | 16975 |
| 3701 | ACATAGTGCTCTTGTGGC | NC_045512.2 | 3′→5′ | 16959 | 16976 |
| 3702 | AGAAAACTCATCTGAGAT | NC_045512.2 | 3′→5′ | 17008 | 17025 |
| 3703 | TAGAAAACTCATCTGAGA | NC_045512.2 | 3′→5′ | 17009 | 17026 |
| 3704 | CTAGAAAACTCATCTGAG | NC_045512.2 | 3′→5′ | 17010 | 17027 |
| 3705 | GCTAGAAAACTCATCTGA | NC_045512.2 | 3′→5′ | 17011 | 17028 |
| 3706 | TGCTAGAAAACTCATCTG | NC_045512.2 | 3′→5′ | 17012 | 17029 |
| 3707 | TTGCTAGAAAACTCATCT | NC_045512.2 | 3′→5′ | 17013 | 17030 |
| 3708 | ATTGCTAGAAAACTCATC | NC_045512.2 | 3′→5′ | 17014 | 17031 |
| 3709 | CATTGCTAGAAAACTCAT | NC_045512.2 | 3′→5′ | 17015 | 17032 |
| 3710 | ACATTGCTAGAAAACTCA | NC_045512.2 | 3′→5′ | 17016 | 17033 |
| 3711 | AACATTGCTAGAAAACTC | NC_045512.2 | 3′→5′ | 17017 | 17034 |
| 3712 | CAACATTGCTAGAAAACT | NC_045512.2 | 3′→5′ | 17018 | 17035 |
| 3713 | GCAACATTGCTAGAAAAC | NC_045512.2 | 3′→5′ | 17019 | 17036 |
| 3714 | TGCAACATTGCTAGAAAA | NC_045512.2 | 3′→5′ | 17020 | 17037 |
| 3715 | TTGCAACATTGCTAGAAA | NC_045512.2 | 3′→5′ | 17021 | 17038 |
| 3716 | TTTGCAACATTGCTAGAA | NC_045512.2 | 3′→5′ | 17022 | 17039 |
| 3717 | ATTTGCAACATTGCTAGA | NC_045512.2 | 3′→5′ | 17023 | 17040 |
| 3718 | AATTTGCAACATTGCTAG | NC_045512.2 | 3′→5′ | 17024 | 17041 |
| 3719 | TAATTTGCAACATTGCTA | NC_045512.2 | 3′→5′ | 17025 | 17042 |
| 3720 | ACCAGTACCAGGTGGTCC | NC_045512.2 | 3′→5′ | 17080 | 17097 |
| 3721 | TACCAGTACCAGGTGGTC | NC_045512.2 | 3′→5′ | 17081 | 17098 |
| 3722 | TTACCAGTACCAGGTGGT | NC_045512.2 | 3′→5′ | 17082 | 17099 |
| 3723 | CTTACCAGTACCAGGTGG | NC_045512.2 | 3′→5′ | 17083 | 17100 |
| 3724 | TCTTACCAGTACCAGGTG | NC_045512.2 | 3′→5′ | 17084 | 17101 |
| 3725 | CTCTTACCAGTACCAGGT | NC_045512.2 | 3′→5′ | 17085 | 17102 |
| 3726 | ACTCTTACCAGTACCAGG | NC_045512.2 | 3′→5′ | 17086 | 17103 |
| 3727 | GACTCTTACCAGTACCAG | NC_045512.2 | 3′→5′ | 17087 | 17104 |
| 3728 | TGACTCTTACCAGTACCA | NC_045512.2 | 3′→5′ | 17088 | 17105 |
| 3729 | ATGACTCTTACCAGTACC | NC_045512.2 | 3′→5′ | 17089 | 17106 |
| 3730 | AATGACTCTTACCAGTAC | NC_045512.2 | 3′→5′ | 17090 | 17107 |
| 3731 | AAATGACTCTTACCAGTA | NC_045512.2 | 3′→5′ | 17091 | 17108 |
| 3732 | AAAATGACTCTTACCAGT | NC_045512.2 | 3′→5′ | 17092 | 17109 |
| 3733 | CAAAATGACTCTTACCAG | NC_045512.2 | 3′→5′ | 17093 | 17110 |
| 3734 | GCAAAATGACTCTTACCA | NC_045512.2 | 3′→5′ | 17094 | 17111 |
| 3735 | ATACACTATGCGAGCAGA | NC_045512.2 | 3′→5′ | 17137 | 17154 |
| 3736 | TATACACTATGCGAGCAG | NC_045512.2 | 3′→5′ | 17138 | 17155 |
| 3737 | GTATACACTATGCGAGCA | NC_045512.2 | 3′→5′ | 17139 | 17156 |
| 3738 | TGAATTCACTTTGAATTT | NC_045512.2 | 3′→5′ | 17269 | 17286 |
| 3739 | TTGAATTCACTTTGAATT | NC_045512.2 | 3′→5′ | 17270 | 17287 |
| 3740 | GTTGAATTCACTTTGAAT | NC_045512.2 | 3′→5′ | 17271 | 17288 |
| 3741 | TGTTGAATTCACTTTGAA | NC_045512.2 | 3′→5′ | 17272 | 17289 |
| 3742 | GAACATGTCTGGACCTAT | NC_045512.2 | 3′→5′ | 17530 | 17547 |
| 3743 | GGAACATGTCTGGACCTA | NC_045512.2 | 3′→5′ | 17531 | 17548 |
| 3744 | AGGAACATGTCTGGACCT | NC_045512.2 | 3′→5′ | 17532 | 17549 |
| 3745 | AATTTCAGCAGGACAACG | NC_045512.2 | 3′→5′ | 17563 | 17580 |
| 3746 | CAATTTCAGCAGGACAAC | NC_045512.2 | 3′→5′ | 17564 | 17581 |
| 3747 | ACAATTTCAGCAGGACAA | NC_045512.2 | 3′→5′ | 17565 | 17582 |
| 3748 | TGCAGATGAAACATCATG | NC_045512.2 | 3′→5′ | 17680 | 17697 |
| 3749 | TTGCAGATGAAACATCAT | NC_045512.2 | 3′→5′ | 17681 | 17698 |
| 3750 | ATTGCAGATGAAACATCA | NC_045512.2 | 3′→5′ | 17682 | 17699 |
| 3751 | AGCTTTTCTCCAAGCAGG | NC_045512.2 | 3′→5′ | 17746 | 17763 |
| 3752 | CAGCTTTTCTCCAAGCAG | NC_045512.2 | 3′→5′ | 17747 | 17764 |
| 3753 | ACAGCTTTTCTCCAAGCA | NC_045512.2 | 3′→5′ | 17748 | 17765 |
| 3754 | GAATATGACATAGTCATA | NC_045512.2 | 3′→5′ | 17857 | 17874 |
| 3755 | TGAATATGACATAGTCAT | NC_045512.2 | 3′→5′ | 17858 | 17875 |
| 3756 | GTGAATATGACATAGTCA | NC_045512.2 | 3′→5′ | 17859 | 17876 |
| 3757 | TCTATCAGACATTATGCA | NC_045512.2 | 3′→5′ | 17956 | 17973 |
| 3758 | CTCTATCAGACATTATGC | NC_045512.2 | 3′→5′ | 17957 | 17974 |
| 3759 | TCTCTATCAGACATTATG | NC_045512.2 | 3′→5′ | 17958 | 17975 |
| 3760 | GTGTGTAGGTGCCTGTGT | NC_045512.2 | 3′→5′ | 18100 | 18117 |
| 3761 | GGTGTGTAGGTGCCTGTG | NC_045512.2 | 3′→5′ | 18101 | 18118 |
| 3762 | AGGTGTGTAGGTGCCTGT | NC_045512.2 | 3′→5′ | 18102 | 18119 |
| 3763 | GAGGTGTGTAGGTGCCTG | NC_045512.2 | 3′→5′ | 18103 | 18120 |
| 3764 | TGAGGTGTGTAGGTGCCT | NC_045512.2 | 3′→5′ | 18104 | 18121 |
| 3765 | CTGAGGTGTGTAGGTGCC | NC_045512.2 | 3′→5′ | 18105 | 18122 |
| 3766 | CATCATAGAGATGAGTCT | NC_045512.2 | 3′→5′ | 18196 | 18213 |
| 3767 | CCATCATAGAGATGAGTC | NC_045512.2 | 3′→5′ | 18197 | 18214 |
| 3768 | CCCATCATAGAGATGAGT | NC_045512.2 | 3′→5′ | 18198 | 18215 |
| 3769 | ACCCATCATAGAGATGAG | NC_045512.2 | 3′→5′ | 18199 | 18216 |
| 3770 | AACCCATCATAGAGATGA | NC_045512.2 | 3′→5′ | 18200 | 18217 |
| 3771 | AAACCCATCATAGAGATG | NC_045512.2 | 3′→5′ | 18201 | 18218 |
| 3772 | CACATTTTCTAAACTCTG | NC_045512.2 | 3′→5′ | 19618 | 19635 |
| 3773 | CCACATTTTCTAAACTCT | NC_045512.2 | 3′→5′ | 19619 | 19636 |
| 3774 | GCCACATTTTCTAAACTC | NC_045512.2 | 3′→5′ | 19620 | 19637 |
| 3775 | AGCCACATTTTCTAAACT | NC_045512.2 | 3′→5′ | 19621 | 19638 |
| 3776 | AAGCCACATTTTCTAAAC | NC_045512.2 | 3′→5′ | 19622 | 19639 |
| 3777 | CTTAGCCCAAAGCTCAAA | NC_045512.2 | 3′→5′ | 19783 | 19800 |
| 3778 | GCTTAGCCCAAAGCTCAA | NC_045512.2 | 3′→5′ | 19784 | 19801 |
| 3779 | CGCTTAGCCCAAAGCTCA | NC_045512.2 | 3′→5′ | 19785 | 19802 |
| 3780 | ACCCAAATTATTGAGTAT | NC_045512.2 | 3′→5′ | 19831 | 19848 |
| 3781 | CACCCAAATTATTGAGTA | NC_045512.2 | 3′→5′ | 19832 | 19849 |
| 3782 | ACACCCAAATTATTGAGT | NC_045512.2 | 3′→5′ | 19833 | 19850 |
| 3783 | AATTAATGTGACTCCATT | NC_045512.2 | 3′→5′ | 20107 | 20124 |
| 3784 | CAATTAATGTGACTCCAT | NC_045512.2 | 3′→5′ | 20108 | 20125 |
| 3785 | CCAATTAATGTGACTCCA | NC_045512.2 | 3′→5′ | 20109 | 20126 |
| 3786 | TCCAATTAATGTGACTCC | NC_045512.2 | 3′→5′ | 20110 | 20127 |
| 3787 | CTCCAATTAATGTGACTC | NC_045512.2 | 3′→5′ | 20111 | 20128 |
| 3788 | TCTCCAATTAATGTGACT | NC_045512.2 | 3′→5′ | 20112 | 20129 |
| 3789 | TTCTCCAATTAATGTGAC | NC_045512.2 | 3′→5′ | 20113 | 20130 |
| 3790 | TGCGACATTCATCATTAT | NC_045512.2 | 3′→5′ | 20776 | 20793 |
| 3791 | TTGCGACATTCATCATTA | NC_045512.2 | 3′→5′ | 20777 | 20794 |
| 3792 | TTTGCGACATTCATCATT | NC_045512.2 | 3′→5′ | 20778 | 20795 |
| 3793 | TCTGTTGTTTTCTCTAAT | NC_045512.2 | 3′→5′ | 21502 | 21519 |
| 3794 | CTCTGTTGTTTTCTCTAA | NC_045512.2 | 3′→5′ | 21503 | 21520 |
| 3795 | ACTCTGTTGTTTTCTCTA | NC_045512.2 | 3′→5′ | 21504 | 21521 |
| 3796 | AACTCTGTTGTTTTCTCT | NC_045512.2 | 3′→5′ | 21505 | 21522 |
| 3797 | CAACTCTGTTGTTTTCTC | NC_045512.2 | 3′→5′ | 21506 | 21523 |
| 3798 | ACAACTCTGTTGTTTTCT | NC_045512.2 | 3′→5′ | 21507 | 21524 |
| 3799 | GTTCTCATAGAGAACATT | NC_045512.2 | 3′→5′ | 24302 | 24319 |
| 3800 | GGTTCTCATAGAGAACAT | NC_045512.2 | 3′→5′ | 24303 | 24320 |
| 3801 | TGGTTCTCATAGAGAACA | NC_045512.2 | 3′→5′ | 24304 | 24321 |
| 3802 | TTGGTTCTCATAGAGAAC | NC_045512.2 | 3′→5′ | 24305 | 24322 |
| 3803 | TTTGGTTCTCATAGAGAA | NC_045512.2 | 3′→5′ | 24306 | 24323 |
| 3804 | TTTTGGTTCTCATAGAGA | NC_045512.2 | 3′→5′ | 24307 | 24324 |
| 3805 | TTTTTGGTTCTCATAGAG | NC_045512.2 | 3′→5′ | 24308 | 24325 |
| 3806 | GCTAAGTTGTTTAACAAG | NC_045512.2 | 3′→5′ | 24446 | 24463 |
| 3807 | AGCTAAGTTGTTTAACAA | NC_045512.2 | 3′→5′ | 24447 | 24464 |
| 3808 | GAGCTAAGTTGTTTAACA | NC_045512.2 | 3′→5′ | 24448 | 24465 |
| 3809 | AGCAAGATTAGCAGAAGC | NC_045512.2 | 3′→5′ | 24620 | 24637 |
| 3810 | CAGCAAGATTAGCAGAAG | NC_045512.2 | 3′→5′ | 24621 | 24638 |
| 3811 | GCAGCAAGATTAGCAGAA | NC_045512.2 | 3′→5′ | 24622 | 24639 |
| 3812 | AGCAGCAAGATTAGCAGA | NC_045512.2 | 3′→5′ | 24623 | 24640 |
| 3813 | TAGCAGCAAGATTAGCAG | NC_045512.2 | 3′→5′ | 24624 | 24641 |
| 3814 | GTAGCAGCAAGATTAGCA | NC_045512.2 | 3′→5′ | 24625 | 24642 |
| 3815 | AGTAGCAGCAAGATTAGC | NC_045512.2 | 3′→5′ | 24626 | 24643 |
| 3816 | TAGTAGCAGCAAGATTAG | NC_045512.2 | 3′→5′ | 24627 | 24644 |
| 3817 | TTAGTAGCAGCAAGATTA | NC_045512.2 | 3′→5′ | 24628 | 24645 |
| 3818 | TTTAGTAGCAGCAAGATT | NC_045512.2 | 3′→5′ | 24629 | 24646 |
| 3819 | TTTTAGTAGCAGCAAGAT | NC_045512.2 | 3′→5′ | 24630 | 24647 |
| 3820 | ATTTTAGTAGCAGCAAGA | NC_045512.2 | 3′→5′ | 24631 | 24648 |
| 3821 | CATTTTAGTAGCAGCAAG | NC_045512.2 | 3′→5′ | 24632 | 24649 |
| 3822 | ACATTTTAGTAGCAGCAA | NC_045512.2 | 3′→5′ | 24633 | 24650 |
| 3823 | GACATTTTAGTAGCAGCA | NC_045512.2 | 3′→5′ | 24634 | 24651 |
| 3824 | TCTTTTTGATTGTCCAAG | NC_045512.2 | 3′→5′ | 24662 | 24679 |
| 3825 | CTCTTTTTGATTGTCCAA | NC_045512.2 | 3′→5′ | 24663 | 24680 |
| 3826 | ACTCTTTTTGATTGTCCA | NC_045512.2 | 3′→5′ | 24664 | 24681 |
| 3827 | AACTCTTTTTGATTGTCC | NC_045512.2 | 3′→5′ | 24665 | 24682 |
| 3828 | CAACTCTTTTTGATTGTC | NC_045512.2 | 3′→5′ | 24666 | 24683 |
| 3829 | TCAACTCTTTTTGATTGT | NC_045512.2 | 3′→5′ | 24667 | 24684 |
| 3830 | ATCTGGTGATGTATGATT | NC_045512.2 | 3′→5′ | 25034 | 25051 |
| 3831 | CATCTGGTGATGTATGAT | NC_045512.2 | 3′→5′ | 25035 | 25052 |
| 3832 | ACATCTGGTGATGTATGA | NC_045512.2 | 3′→5′ | 25036 | 25053 |
| 3833 | AACATCTGGTGATGTATG | NC_045512.2 | 3′→5′ | 25037 | 25054 |
| 3834 | CAACATCTGGTGATGTAT | NC_045512.2 | 3′→5′ | 25038 | 25055 |
| 3835 | TCAACATCTGGTGATGTA | NC_045512.2 | 3′→5′ | 25039 | 25056 |
| 3836 | ATCAACATCTGGTGATGT | NC_045512.2 | 3′→5′ | 25040 | 25057 |
| 3837 | TGAGGCGGTCAATTTCTT | NC_045512.2 | 3′→5′ | 25104 | 25121 |
| 3838 | TTGAGGCGGTCAATTTCT | NC_045512.2 | 3′→5′ | 25105 | 25122 |
| 3839 | ATTGAGGCGGTCAATTTC | NC_045512.2 | 3′→5′ | 25106 | 25123 |
| 3840 | CATTGAGGCGGTCAATTT | NC_045512.2 | 3′→5′ | 25107 | 25124 |
| 3841 | TCATTGAGGCGGTCAATT | NC_045512.2 | 3′→5′ | 25108 | 25125 |
| 3842 | CTCATTGAGGCGGTCAAT | NC_045512.2 | 3′→5′ | 25109 | 25126 |
| 3843 | CCTCATTGAGGCGGTCAA | NC_045512.2 | 3′→5′ | 25110 | 25127 |
| 3844 | ACCTCATTGAGGCGGTCA | NC_045512.2 | 3′→5′ | 25111 | 25128 |
| 3845 | TGTGTAATGTAATTTGAC | NC_045512.2 | 3′→5′ | 25364 | 25381 |
| 3846 | ATGTGTAATGTAATTTGA | NC_045512.2 | 3′→5′ | 25365 | 25382 |
| 3847 | TATGTGTAATGTAATTTG | NC_045512.2 | 3′→5′ | 25366 | 25383 |
| 3848 | TTATGTGTAATGTAATTT | NC_045512.2 | 3′→5′ | 25367 | 25384 |
| 3849 | TTTATGTGTAATGTAATT | NC_045512.2 | 3′→5′ | 25368 | 25385 |
| 3850 | GTTTATGTGTAATGTAAT | NC_045512.2 | 3′→5′ | 25369 | 25386 |
| 3851 | CGTTTATGTGTAATGTAA | NC_045512.2 | 3′→5′ | 25370 | 25387 |
| 3852 | AAGGGAGTGAGGCTTGTA | NC_045512.2 | 3′→5′ | 25502 | 25519 |
| 3853 | AAAGGGAGTGAGGCTTGT | NC_045512.2 | 3′→5′ | 25503 | 25520 |
| 3854 | GAAAGGGAGTGAGGCTTG | NC_045512.2 | 3′→5′ | 25504 | 25521 |
| 3855 | CGAAAGGGAGTGAGGCTT | NC_045512.2 | 3′→5′ | 25505 | 25522 |
| 3856 | CCGAAAGGGAGTGAGGCT | NC_045512.2 | 3′→5′ | 25506 | 25523 |
| 3857 | TCCGAAAGGGAGTGAGGC | NC_045512.2 | 3′→5′ | 25507 | 25524 |
| 3858 | ATCCGAAAGGGAGTGAGG | NC_045512.2 | 3′→5′ | 25508 | 25525 |
| 3859 | CATCCGAAAGGGAGTGAG | NC_045512.2 | 3′→5′ | 25509 | 25526 |
| 3860 | CCATCCGAAAGGGAGTGA | NC_045512.2 | 3′→5′ | 25510 | 25527 |
| 3861 | GCCATCCGAAAGGGAGTG | NC_045512.2 | 3′→5′ | 25511 | 25528 |
| 3862 | AGCCATCCGAAAGGGAGT | NC_045512.2 | 3′→5′ | 25512 | 25529 |
| 3863 | AAGCCATCCGAAAGGGAG | NC_045512.2 | 3′→5′ | 25513 | 25530 |
| 3864 | GCTAGTAGTCGTCGTCGG | NC_045512.2 | 3′→5′ | 26191 | 26208 |
| 3865 | CGCTAGTAGTCGTCGTCG | NC_045512.2 | 3′→5′ | 26192 | 26209 |
| 3866 | ACGCTAGTAGTCGTCGTC | NC_045512.2 | 3′→5′ | 26193 | 26210 |
| 3867 | CACGCTAGTAGTCGTCGT | NC_045512.2 | 3′→5′ | 26194 | 26211 |
| 3868 | GCACGCTAGTAGTCGTCG | NC_045512.2 | 3′→5′ | 26195 | 26212 |
| 3869 | GGCACGCTAGTAGTCGTC | NC_045512.2 | 3′→5′ | 26196 | 26213 |
| 3870 | AGGCACGCTAGTAGTCGT | NC_045512.2 | 3′→5′ | 26197 | 26214 |
| 3871 | AAGGCACGCTAGTAGTCG | NC_045512.2 | 3′→5′ | 26198 | 26215 |
| 3872 | AAAGGCACGCTAGTAGTC | NC_045512.2 | 3′→5′ | 26199 | 26216 |
| 3873 | CAAAGGCACGCTAGTAGT | NC_045512.2 | 3′→5′ | 26200 | 26217 |
| 3874 | ACAAAGGCACGCTAGTAG | NC_045512.2 | 3′→5′ | 26201 | 26218 |
| 3875 | TACAAAGGCACGCTAGTA | NC_045512.2 | 3′→5′ | 26202 | 26219 |
| 3876 | TTACAAAGGCACGCTAGT | NC_045512.2 | 3′→5′ | 26203 | 26220 |
| 3877 | CTTACAAAGGCACGCTAG | NC_045512.2 | 3′→5′ | 26204 | 26221 |
| 3878 | GCTTACAAAGGCACGCTA | NC_045512.2 | 3′→5′ | 26205 | 26222 |
| 3879 | TGCTTACAAAGGCACGCT | NC_045512.2 | 3′→5′ | 26206 | 26223 |
| 3880 | GTGCTTACAAAGGCACGC | NC_045512.2 | 3′→5′ | 26207 | 26224 |
| 3881 | TGTGCTTACAAAGGCACG | NC_045512.2 | 3′→5′ | 26208 | 26225 |
| 3882 | TTGTGCTTACAAAGGCAC | NC_045512.2 | 3′→5′ | 26209 | 26226 |
| 3883 | CTTGTGCTTACAAAGGCA | NC_045512.2 | 3′→5′ | 26210 | 26227 |
| 3884 | TACATAAGTTCGTACTCA | NC_045512.2 | 3′→5′ | 26232 | 26249 |
| 3885 | GTACATAAGTTCGTACTC | NC_045512.2 | 3′→5′ | 26233 | 26250 |
| 3886 | AGTACATAAGTTCGTACT | NC_045512.2 | 3′→5′ | 26234 | 26251 |
| 3887 | GAGTACATAAGTTCGTAC | NC_045512.2 | 3′→5′ | 26235 | 26252 |
| 3888 | TGAGTACATAAGTTCGTA | NC_045512.2 | 3′→5′ | 26236 | 26253 |
| 3889 | ATGAGTACATAAGTTCGT | NC_045512.2 | 3′→5′ | 26237 | 26254 |
| 3890 | AATGAGTACATAAGTTCG | NC_045512.2 | 3′→5′ | 26238 | 26255 |
| 3891 | GAATGAGTACATAAGTTC | NC_045512.2 | 3′→5′ | 26239 | 26256 |
| 3892 | CGAATGAGTACATAAGTT | NC_045512.2 | 3′→5′ | 26240 | 26257 |
| 3893 | ACGAATGAGTACATAAGT | NC_045512.2 | 3′→5′ | 26241 | 26258 |
| 3894 | AACGAATGAGTACATAAG | NC_045512.2 | 3′→5′ | 26242 | 26259 |
| 3895 | AAACGAATGAGTACATAA | NC_045512.2 | 3′→5′ | 26243 | 26260 |
| 3896 | GAAACGAATGAGTACATA | NC_045512.2 | 3′→5′ | 26244 | 26261 |
| 3897 | CGAAACGAATGAGTACAT | NC_045512.2 | 3′→5′ | 26245 | 26262 |
| 3898 | CCGAAACGAATGAGTACA | NC_045512.2 | 3′→5′ | 26246 | 26263 |
| 3899 | TCCGAAACGAATGAGTAC | NC_045512.2 | 3′→5′ | 26247 | 26264 |
| 3900 | TTCCGAAACGAATGAGTA | NC_045512.2 | 3′→5′ | 26248 | 26265 |
| 3901 | CTTCCGAAACGAATGAGT | NC_045512.2 | 3′→5′ | 26249 | 26266 |
| 3902 | TCTTCCGAAACGAATGAG | NC_045512.2 | 3′→5′ | 26250 | 26267 |
| 3903 | AACTATTAACGTACCTGT | NC_045512.2 | 3′→5′ | 26269 | 26286 |
| 3904 | TAACTATTAACGTACCTG | NC_045512.2 | 3′→5′ | 26270 | 26287 |
| 3905 | TTAACTATTAACGTACCT | NC_045512.2 | 3′→5′ | 26271 | 26288 |
| 3906 | ATTAACTATTAACGTACC | NC_045512.2 | 3′→5′ | 26272 | 26289 |
| 3907 | TATTAACTATTAACGTAC | NC_045512.2 | 3′→5′ | 26273 | 26290 |
| 3908 | CTATTAACTATTAACGTA | NC_045512.2 | 3′→5′ | 26274 | 26291 |
| 3909 | GCTATTAACTATTAACGT | NC_045512.2 | 3′→5′ | 26275 | 26292 |
| 3910 | CGCTATTAACTATTAACG | NC_045512.2 | 3′→5′ | 26276 | 26293 |
| 3911 | ACGCTATTAACTATTAAC | NC_045512.2 | 3′→5′ | 26277 | 26294 |
| 3912 | TACGCTATTAACTATTAA | NC_045512.2 | 3′→5′ | 26278 | 26295 |
| 3913 | GTACGCTATTAACTATTA | NC_045512.2 | 3′→5′ | 26279 | 26296 |
| 3914 | AGTACGCTATTAACTATT | NC_045512.2 | 3′→5′ | 26280 | 26297 |
| 3915 | AAGTACGCTATTAACTAT | NC_045512.2 | 3′→5′ | 26281 | 26298 |
| 3916 | GAAGTACGCTATTAACTA | NC_045512.2 | 3′→5′ | 26282 | 26299 |
| 3917 | AGAAGTACGCTATTAACT | NC_045512.2 | 3′→5′ | 26283 | 26300 |
| 3918 | AAGAAGTACGCTATTAAC | NC_045512.2 | 3′→5′ | 26284 | 26301 |
| 3919 | AAAGAAGTACGCTATTAA | NC_045512.2 | 3′→5′ | 26285 | 26302 |
| 3920 | AAAAGAAGTACGCTATTA | NC_045512.2 | 3′→5′ | 26286 | 26303 |
| 3921 | AAAAAGAAGTACGCTATT | NC_045512.2 | 3′→5′ | 26287 | 26304 |
| 3922 | GAAAAAGAAGTACGCTAT | NC_045512.2 | 3′→5′ | 26288 | 26305 |
| 3923 | AGAAAAAGAAGTACGCTA | NC_045512.2 | 3′→5′ | 26289 | 26306 |
| 3924 | AAGAAAAAGAAGTACGCT | NC_045512.2 | 3′→5′ | 26290 | 26307 |
| 3925 | CAAGAAAAAGAAGTACGC | NC_045512.2 | 3′→5′ | 26291 | 26308 |
| 3926 | GCAAGAAAAAGAAGTACG | NC_045512.2 | 3′→5′ | 26292 | 26309 |
| 3927 | AGCAAGAAAAAGAAGTAC | NC_045512.2 | 3′→5′ | 26293 | 26310 |
| 3928 | AAGCAAGAAAAAGAAGTA | NC_045512.2 | 3′→5′ | 26294 | 26311 |
| 3929 | AAAGCAAGAAAAAGAAGT | NC_045512.2 | 3′→5′ | 26295 | 26312 |
| 3930 | GAAAGCAAGAAAAAGAAG | NC_045512.2 | 3′→5′ | 26296 | 26313 |
| 3931 | CGAAAGCAAGAAAAAGAA | NC_045512.2 | 3′→5′ | 26297 | 26314 |
| 3932 | ACGAAAGCAAGAAAAAGA | NC_045512.2 | 3′→5′ | 26298 | 26315 |
| 3933 | CACGAAAGCAAGAAAAAG | NC_045512.2 | 3′→5′ | 26299 | 26316 |
| 3934 | CCACGAAAGCAAGAAAAA | NC_045512.2 | 3′→5′ | 26300 | 26317 |
| 3935 | ACCACGAAAGCAAGAAAA | NC_045512.2 | 3′→5′ | 26301 | 26318 |
| 3936 | TACCACGAAAGCAAGAAA | NC_045512.2 | 3′→5′ | 26302 | 26319 |
| 3937 | ATACCACGAAAGCAAGAA | NC_045512.2 | 3′→5′ | 26303 | 26320 |
| 3938 | AATACCACGAAAGCAAGA | NC_045512.2 | 3′→5′ | 26304 | 26321 |
| 3939 | GAATACCACGAAAGCAAG | NC_045512.2 | 3′→5′ | 26305 | 26322 |
| 3940 | AGAATACCACGAAAGCAA | NC_045512.2 | 3′→5′ | 26306 | 26323 |
| 3941 | AAGAATACCACGAAAGCA | NC_045512.2 | 3′→5′ | 26307 | 26324 |
| 3942 | CAAGAATACCACGAAAGC | NC_045512.2 | 3′→5′ | 26308 | 26325 |
| 3943 | GCAAGAATACCACGAAAG | NC_045512.2 | 3′→5′ | 26309 | 26326 |
| 3944 | AGCAAGAATACCACGAAA | NC_045512.2 | 3′→5′ | 26310 | 26327 |
| 3945 | TAGCAAGAATACCACGAA | NC_045512.2 | 3′→5′ | 26311 | 26328 |
| 3946 | CTAGCAAGAATACCACGA | NC_045512.2 | 3′→5′ | 26312 | 26329 |
| 3947 | ACTAGCAAGAATACCACG | NC_045512.2 | 3′→5′ | 26313 | 26330 |
| 3948 | AGTAAGGATGGCTAGTGT | NC_045512.2 | 3′→5′ | 26332 | 26349 |
| 3949 | CAGTAAGGATGGCTAGTG | NC_045512.2 | 3′→5′ | 26333 | 26350 |
| 3950 | GCAGTAAGGATGGCTAGT | NC_045512.2 | 3′→5′ | 26334 | 26351 |
| 3951 | CGCAGTAAGGATGGCTAG | NC_045512.2 | 3′→5′ | 26335 | 26352 |
| 3952 | GCGCAGTAAGGATGGCTA | NC_045512.2 | 3′→5′ | 26336 | 26353 |
| 3953 | AGCGCAGTAAGGATGGCT | NC_045512.2 | 3′→5′ | 26337 | 26354 |
| 3954 | AAGCGCAGTAAGGATGGC | NC_045512.2 | 3′→5′ | 26338 | 26355 |
| 3955 | GAAGCGCAGTAAGGATGG | NC_045512.2 | 3′→5′ | 26339 | 26356 |
| 3956 | CGAAGCGCAGTAAGGATG | NC_045512.2 | 3′→5′ | 26340 | 26357 |
| 3957 | TCGAAGCGCAGTAAGGAT | NC_045512.2 | 3′→5′ | 26341 | 26358 |
| 3958 | ATCGAAGCGCAGTAAGGA | NC_045512.2 | 3′→5′ | 26342 | 26359 |
| 3959 | AATCGAAGCGCAGTAAGG | NC_045512.2 | 3′→5′ | 26343 | 26360 |
| 3960 | CAATCGAAGCGCAGTAAG | NC_045512.2 | 3′→5′ | 26344 | 26361 |
| 3961 | ACAATCGAAGCGCAGTAA | NC_045512.2 | 3′→5′ | 26345 | 26362 |
| 3962 | CACAATCGAAGCGCAGTA | NC_045512.2 | 3′→5′ | 26346 | 26363 |
| 3963 | ACACAATCGAAGCGCAGT | NC_045512.2 | 3′→5′ | 26347 | 26364 |
| 3964 | CACACAATCGAAGCGCAG | NC_045512.2 | 3′→5′ | 26348 | 26365 |
| 3965 | GCACACAATCGAAGCGCA | NC_045512.2 | 3′→5′ | 26349 | 26366 |
| 3966 | CGCACACAATCGAAGCGC | NC_045512.2 | 3′→5′ | 26350 | 26367 |
| 3967 | ACGCACACAATCGAAGCG | NC_045512.2 | 3′→5′ | 26351 | 26368 |
| 3968 | TACGCACACAATCGAAGC | NC_045512.2 | 3′→5′ | 26352 | 26369 |
| 3969 | GTACGCACACAATCGAAG | NC_045512.2 | 3′→5′ | 26353 | 26370 |
| 3970 | AGTACGCACACAATCGAA | NC_045512.2 | 3′→5′ | 26354 | 26371 |
| 3971 | CAGTACGCACACAATCGA | NC_045512.2 | 3′→5′ | 26355 | 26372 |
| 3972 | GCAGTACGCACACAATCG | NC_045512.2 | 3′→5′ | 26356 | 26373 |
| 3973 | AGCAGTACGCACACAATC | NC_045512.2 | 3′→5′ | 26357 | 26374 |
| 3974 | CAGCAGTACGCACACAAT | NC_045512.2 | 3′→5′ | 26358 | 26375 |
| 3975 | GCAGCAGTACGCACACAA | NC_045512.2 | 3′→5′ | 26359 | 26376 |
| 3976 | TGCAGCAGTACGCACACA | NC_045512.2 | 3′→5′ | 26360 | 26377 |
| 3977 | TTGCAGCAGTACGCACAC | NC_045512.2 | 3′→5′ | 26361 | 26378 |
| 3978 | ATTGCAGCAGTACGCACA | NC_045512.2 | 3′→5′ | 26362 | 26379 |
| 3979 | TATTGCAGCAGTACGCAC | NC_045512.2 | 3′→5′ | 26363 | 26380 |
| 3980 | ATATTGCAGCAGTACGCA | NC_045512.2 | 3′→5′ | 26364 | 26381 |
| 3981 | AATATTGCAGCAGTACGC | NC_045512.2 | 3′→5′ | 26365 | 26382 |
| 3982 | CAATATTGCAGCAGTACG | NC_045512.2 | 3′→5′ | 26366 | 26383 |
| 3983 | ACAATATTGCAGCAGTAC | NC_045512.2 | 3′→5′ | 26367 | 26384 |
| 3984 | AACAATATTGCAGCAGTA | NC_045512.2 | 3′→5′ | 26368 | 26385 |
| 3985 | TAACAATATTGCAGCAGT | NC_045512.2 | 3′→5′ | 26369 | 26386 |
| 3986 | TTAACAATATTGCAGCAG | NC_045512.2 | 3′→5′ | 26370 | 26387 |
| 3987 | GTTAACAATATTGCAGCA | NC_045512.2 | 3′→5′ | 26371 | 26388 |
| 3988 | CGTTAACAATATTGCAGC | NC_045512.2 | 3′→5′ | 26372 | 26389 |
| 3989 | ACGTTAACAATATTGCAG | NC_045512.2 | 3′→5′ | 26373 | 26390 |
| 3990 | CACGTTAACAATATTGCA | NC_045512.2 | 3′→5′ | 26374 | 26391 |
| 3991 | TCACGTTAACAATATTGC | NC_045512.2 | 3′→5′ | 26375 | 26392 |
| 3992 | CTCACGTTAACAATATTG | NC_045512.2 | 3′→5′ | 26376 | 26393 |
| 3993 | ACTCACGTTAACAATATT | NC_045512.2 | 3′→5′ | 26377 | 26394 |
| 3994 | CCAGAAGATCAGGAACTC | NC_045512.2 | 3′→5′ | 26450 | 26467 |
| 3995 | ACCAGAAGATCAGGAACT | NC_045512.2 | 3′→5′ | 26451 | 26468 |
| 3996 | GACCAGAAGATCAGGAAC | NC_045512.2 | 3′→5′ | 26452 | 26469 |
| 3997 | AGACCAGAAGATCAGGAA | NC_045512.2 | 3′→5′ | 26453 | 26470 |
| 3998 | TAGACCAGAAGATCAGGA | NC_045512.2 | 3′→5′ | 26454 | 26471 |
| 3999 | TTAGACCAGAAGATCAGG | NC_045512.2 | 3′→5′ | 26455 | 26472 |
| 4000 | TTTAGACCAGAAGATCAG | NC_045512.2 | 3′→5′ | 26456 | 26473 |
| 4001 | GTTTAGACCAGAAGATCA | NC_045512.2 | 3′→5′ | 26457 | 26474 |
| 4002 | CGTTTAGACCAGAAGATC | NC_045512.2 | 3′→5′ | 26458 | 26475 |
| 4003 | TCGTTTAGACCAGAAGAT | NC_045512.2 | 3′→5′ | 26459 | 26476 |
| 4004 | TTCGTTTAGACCAGAAGA | NC_045512.2 | 3′→5′ | 26460 | 26477 |
| 4005 | GTTCGTTTAGACCAGAAG | NC_045512.2 | 3′→5′ | 26461 | 26478 |
| 4006 | AGTTCGTTTAGACCAGAA | NC_045512.2 | 3′→5′ | 26462 | 26479 |
| 4007 | TAGTTCGTTTAGACCAGA | NC_045512.2 | 3′→5′ | 26463 | 26480 |
| 4008 | TTAGTTCGTTTAGACCAG | NC_045512.2 | 3′→5′ | 26464 | 26481 |
| 4009 | TTAAAGTTCCAAACAGAA | NC_045512.2 | 3′→5′ | 26497 | 26514 |
| 4010 | TACTAGGTTCCATTGTTC | NC_045512.2 | 3′→5′ | 26574 | 26591 |
| 4011 | TTACTAGGTTCCATTGTT | NC_045512.2 | 3′→5′ | 26575 | 26592 |
| 4012 | ATTACTAGGTTCCATTGT | NC_045512.2 | 3′→5′ | 26576 | 26593 |
| 4013 | TATTACTAGGTTCCATTG | NC_045512.2 | 3′→5′ | 26577 | 26594 |
| 4014 | CTATTACTAGGTTCCATT | NC_045512.2 | 3′→5′ | 26578 | 26595 |
| 4015 | CCTATTACTAGGTTCCAT | NC_045512.2 | 3′→5′ | 26579 | 26596 |
| 4016 | ACCTATTACTAGGTTCCA | NC_045512.2 | 3′→5′ | 26580 | 26597 |
| 4017 | AACCTATTACTAGGTTCC | NC_045512.2 | 3′→5′ | 26581 | 26598 |
| 4018 | AAACCTATTACTAGGTTC | NC_045512.2 | 3′→5′ | 26582 | 26599 |
| 4019 | GAAACCTATTACTAGGTT | NC_045512.2 | 3′→5′ | 26583 | 26600 |
| 4020 | AAGCGTTCGTGATGTAGC | NC_045512.2 | 3′→5′ | 27033 | 27050 |
| 4021 | AAAGCGTTCGTGATGTAG | NC_045512.2 | 3′→5′ | 27034 | 27051 |
| 4022 | GAAAGCGTTCGTGATGTA | NC_045512.2 | 3′→5′ | 27035 | 27052 |
| 4023 | AGAAAGCGTTCGTGATGT | NC_045512.2 | 3′→5′ | 27036 | 27053 |
| 4024 | AAGAAAGCGTTCGTGATG | NC_045512.2 | 3′→5′ | 27037 | 27054 |
| 4025 | TAAGAAAGCGTTCGTGAT | NC_045512.2 | 3′→5′ | 27038 | 27055 |
| 4026 | ATAAGAAAGCGTTCGTGA | NC_045512.2 | 3′→5′ | 27039 | 27056 |
| 4027 | AATAAGAAAGCGTTCGTG | NC_045512.2 | 3′→5′ | 27040 | 27057 |
| 4028 | TAATAAGAAAGCGTTCGT | NC_045512.2 | 3′→5′ | 27041 | 27058 |
| 4029 | GTAATAAGAAAGCGTTCG | NC_045512.2 | 3′→5′ | 27042 | 27059 |
| 4030 | TGTAATAAGAAAGCGTTC | NC_045512.2 | 3′→5′ | 27043 | 27060 |
| 4031 | TTGTAATAAGAAAGCGTT | NC_045512.2 | 3′→5′ | 27044 | 27061 |
| 4032 | TTTGTAATAAGAAAGCGT | NC_045512.2 | 3′→5′ | 27045 | 27062 |
| 4033 | ATTTGTAATAAGAAAGCG | NC_045512.2 | 3′→5′ | 27046 | 27063 |
| 4034 | AATTTGTAATAAGAAAGC | NC_045512.2 | 3′→5′ | 27047 | 27064 |
| 4035 | GTATGCAGCAAAACCTGA | NC_045512.2 | 3′→5′ | 27093 | 27110 |
| 4036 | TGTATGCAGCAAAACCTG | NC_045512.2 | 3′→5′ | 27094 | 27111 |
| 4037 | TGTTGTCACTTACTGTAC | NC_045512.2 | 3′→5′ | 27183 | 27200 |
| 4038 | CTGTTGTCACTTACTGTA | NC_045512.2 | 3′→5′ | 27184 | 27201 |
| 4039 | TCTGTTGTCACTTACTGT | NC_045512.2 | 3′→5′ | 27185 | 27202 |
| 4040 | ATCTGTTGTCACTTACTG | NC_045512.2 | 3′→5′ | 27186 | 27203 |
| 4041 | CATCTGTTGTCACTTACT | NC_045512.2 | 3′→5′ | 27187 | 27204 |
| 4042 | ACATCTGTTGTCACTTAC | NC_045512.2 | 3′→5′ | 27188 | 27205 |
| 4043 | AACATCTGTTGTCACTTA | NC_045512.2 | 3′→5′ | 27189 | 27206 |
| 4044 | AAACATCTGTTGTCACTT | NC_045512.2 | 3′→5′ | 27190 | 27207 |
| 4045 | GAAACATCTGTTGTCACT | NC_045512.2 | 3′→5′ | 27191 | 27208 |
| 4046 | TGAAACATCTGTTGTCAC | NC_045512.2 | 3′→5′ | 27192 | 27209 |
| 4047 | ATGAAACATCTGTTGTCA | NC_045512.2 | 3′→5′ | 27193 | 27210 |
| 4048 | GATGAAACATCTGTTGTC | NC_045512.2 | 3′→5′ | 27194 | 27211 |
| 4049 | AGATGAAACATCTGTTGT | NC_045512.2 | 3′→5′ | 27195 | 27212 |
| 4050 | TTTCATGTTCGTTTAATC | NC_045512.2 | 3′→5′ | 27382 | 27399 |
| 4051 | TTTTCATGTTCGTTTAAT | NC_045512.2 | 3′→5′ | 27383 | 27400 |
| 4052 | ATTTTCATGTTCGTTTAA | NC_045512.2 | 3′→5′ | 27384 | 27401 |
| 4053 | AATTTTCATGTTCGTTTA | NC_045512.2 | 3′→5′ | 27385 | 27402 |
| 4054 | TAATTTTCATGTTCGTTT | NC_045512.2 | 3′→5′ | 27386 | 27403 |
| 4055 | ATAATTTTCATGTTCGTT | NC_045512.2 | 3′→5′ | 27387 | 27404 |
| 4056 | AATAATTTTCATGTTCGT | NC_045512.2 | 3′→5′ | 27388 | 27405 |
| 4057 | GAATAATTTTCATGTTCG | NC_045512.2 | 3′→5′ | 27389 | 27406 |
| 4058 | AGAATAATTTTCATGTTC | NC_045512.2 | 3′→5′ | 27390 | 27407 |
| 4059 | TGGTGAATTGCCCTCGTA | NC_045512.2 | 3′→5′ | 27511 | 27528 |
| 4060 | ATGGTGAATTGCCCTCGT | NC_045512.2 | 3′→5′ | 27512 | 27529 |
| 4061 | AATGGTGAATTGCCCTCG | NC_045512.2 | 3′→5′ | 27513 | 27530 |
| 4062 | AAATGGTGAATTGCCCTC | NC_045512.2 | 3′→5′ | 27514 | 27531 |
| 4063 | GAAATGGTGAATTGCCCT | NC_045512.2 | 3′→5′ | 27515 | 27532 |
| 4064 | TGAAATGGTGAATTGCCC | NC_045512.2 | 3′→5′ | 27516 | 27533 |
| 4065 | CAAATAGAAGTCAATTAA | NC_045512.2 | 3′→5′ | 27771 | 27788 |
| 4066 | ACAAATAGAAGTCAATTA | NC_045512.2 | 3′→5′ | 27772 | 27789 |
| 4067 | CACAAATAGAAGTCAATT | NC_045512.2 | 3′→5′ | 27773 | 27790 |
| 4068 | GCACAAATAGAAGTCAAT | NC_045512.2 | 3′→5′ | 27774 | 27791 |
| 4069 | AGCACAAATAGAAGTCAA | NC_045512.2 | 3′→5′ | 27775 | 27792 |
| 4070 | AAGCACAAATAGAAGTCA | NC_045512.2 | 3′→5′ | 27776 | 27793 |
| 4071 | AAAGCACAAATAGAAGTC | NC_045512.2 | 3′→5′ | 27777 | 27794 |
| 4072 | AAAAGCACAAATAGAAGT | NC_045512.2 | 3′→5′ | 27778 | 27795 |
| 4073 | AAAAAGCACAAATAGAAG | NC_045512.2 | 3′→5′ | 27779 | 27796 |
| 4074 | TAAAAAGCACAAATAGAA | NC_045512.2 | 3′→5′ | 27780 | 27797 |
| 4075 | CTAAAAAGCACAAATAGA | NC_045512.2 | 3′→5′ | 27781 | 27798 |
| 4076 | GCTAAAAAGCACAAATAG | NC_045512.2 | 3′→5′ | 27782 | 27799 |
| 4077 | GGCTAAAAAGCACAAATA | NC_045512.2 | 3′→5′ | 27783 | 27800 |
| 4078 | AGGCTAAAAAGCACAAAT | NC_045512.2 | 3′→5′ | 27784 | 27801 |
| 4079 | AAGGCTAAAAAGCACAAA | NC_045512.2 | 3′→5′ | 27785 | 27802 |
| 4080 | AAAGGCTAAAAAGCACAA | NC_045512.2 | 3′→5′ | 27786 | 27803 |
| 4081 | GAAAGGCTAAAAAGCACA | NC_045512.2 | 3′→5′ | 27787 | 27804 |
| 4082 | AGAAAGGCTAAAAAGCAC | NC_045512.2 | 3′→5′ | 27788 | 27805 |
| 4083 | CAGAAAGGCTAAAAAGCA | NC_045512.2 | 3′→5′ | 27789 | 27806 |
| 4084 | GCAGAAAGGCTAAAAAGC | NC_045512.2 | 3′→5′ | 27790 | 27807 |
| 4085 | AGCAGAAAGGCTAAAAAG | NC_045512.2 | 3′→5′ | 27791 | 27808 |
| 4086 | TAGCAGAAAGGCTAAAAA | NC_045512.2 | 3′→5′ | 27792 | 27809 |
| 4087 | ATAGCAGAAAGGCTAAAA | NC_045512.2 | 3′→5′ | 27793 | 27810 |
| 4088 | AATAGCAGAAAGGCTAAA | NC_045512.2 | 3′→5′ | 27794 | 27811 |
| 4089 | GAATAGCAGAAAGGCTAA | NC_045512.2 | 3′→5′ | 27795 | 27812 |
| 4090 | GGAATAGCAGAAAGGCTA | NC_045512.2 | 3′→5′ | 27796 | 27813 |
| 4091 | AGGAATAGCAGAAAGGCT | NC_045512.2 | 3′→5′ | 27797 | 27814 |
| 4092 | AAGGAATAGCAGAAAGGC | NC_045512.2 | 3′→5′ | 27798 | 27815 |
| 4093 | CAAGGAATAGCAGAAAGG | NC_045512.2 | 3′→5′ | 27799 | 27816 |
| 4094 | ACAAGGAATAGCAGAAAG | NC_045512.2 | 3′→5′ | 27800 | 27817 |
| 4095 | AACAAGGAATAGCAGAAA | NC_045512.2 | 3′→5′ | 27801 | 27818 |
| 4096 | CCATTATCAGACATTTTA | NC_045512.2 | 3′→5′ | 28270 | 28287 |
| 4097 | TCCATTATCAGACATTTT | NC_045512.2 | 3′→5′ | 28271 | 28288 |
| 4098 | GTCCATTATCAGACATTT | NC_045512.2 | 3′→5′ | 28272 | 28289 |
| 4099 | GGTCCATTATCAGACATT | NC_045512.2 | 3′→5′ | 28273 | 28290 |
| 4100 | GGGTCCATTATCAGACAT | NC_045512.2 | 3′→5′ | 28274 | 28291 |
| 4101 | GGGGTCCATTATCAGACA | NC_045512.2 | 3′→5′ | 28275 | 28292 |
| 4102 | TGGGGTCCATTATCAGAC | NC_045512.2 | 3′→5′ | 28276 | 28293 |
| 4103 | TTGGGGTCCATTATCAGA | NC_045512.2 | 3′→5′ | 28277 | 28294 |
| 4104 | TTTGGGGTCCATTATCAG | NC_045512.2 | 3′→5′ | 28278 | 28295 |
| 4105 | TTTTGGGGTCCATTATCA | NC_045512.2 | 3′→5′ | 28279 | 28296 |
| 4106 | ATTGGGTAAACCTTGGGG | NC_045512.2 | 3′→5′ | 28397 | 28414 |
| 4107 | TATTGGGTAAACCTTGGG | NC_045512.2 | 3′→5′ | 28398 | 28415 |
| 4108 | TTATTGGGTAAACCTTGG | NC_045512.2 | 3′→5′ | 28399 | 28416 |
| 4109 | ATTATTGGGTAAACCTTG | NC_045512.2 | 3′→5′ | 28400 | 28417 |
| 4110 | TATTATTGGGTAAACCTT | NC_045512.2 | 3′→5′ | 28401 | 28418 |
| 4111 | GTATTATTGGGTAAACCT | NC_045512.2 | 3′→5′ | 28402 | 28419 |
| 4112 | AGTATTATTGGGTAAACC | NC_045512.2 | 3′→5′ | 28403 | 28420 |
| 4113 | CAGTATTATTGGGTAAAC | NC_045512.2 | 3′→5′ | 28404 | 28421 |
| 4114 | GCAGTATTATTGGGTAAA | NC_045512.2 | 3′→5′ | 28405 | 28422 |
| 4115 | CGCAGTATTATTGGGTAA | NC_045512.2 | 3′→5′ | 28406 | 28423 |
| 4116 | ACGCAGTATTATTGGGTA | NC_045512.2 | 3′→5′ | 28407 | 28424 |
| 4117 | GACGCAGTATTATTGGGT | NC_045512.2 | 3′→5′ | 28408 | 28425 |
| 4118 | AGACGCAGTATTATTGGG | NC_045512.2 | 3′→5′ | 28409 | 28426 |
| 4119 | AAGACGCAGTATTATTGG | NC_045512.2 | 3′→5′ | 28410 | 28427 |
| 4120 | CAAGACGCAGTATTATTG | NC_045512.2 | 3′→5′ | 28411 | 28428 |
| 4121 | CCAAGACGCAGTATTATT | NC_045512.2 | 3′→5′ | 28412 | 28429 |
| 4122 | ACCAAGACGCAGTATTAT | NC_045512.2 | 3′→5′ | 28413 | 28430 |
| 4123 | AACCAAGACGCAGTATTA | NC_045512.2 | 3′→5′ | 28414 | 28431 |
| 4124 | GAACCAAGACGCAGTATT | NC_045512.2 | 3′→5′ | 28415 | 28432 |
| 4125 | TGAACCAAGACGCAGTAT | NC_045512.2 | 3′→5′ | 28416 | 28433 |
| 4126 | GTGAACCAAGACGCAGTA | NC_045512.2 | 3′→5′ | 28417 | 28434 |
| 4127 | TAGCCAATTTGGTCATCT | NC_045512.2 | 3′→5′ | 28513 | 28530 |
| 4128 | GTAGCCAATTTGGTCATC | NC_045512.2 | 3′→5′ | 28514 | 28531 |
| 4129 | AGTAGCCAATTTGGTCAT | NC_045512.2 | 3′→5′ | 28515 | 28532 |
| 4130 | TAGTAGCCAATTTGGTCA | NC_045512.2 | 3′→5′ | 28516 | 28533 |
| 4131 | GTAGTAGCCAATTTGGTC | NC_045512.2 | 3′→5′ | 28517 | 28534 |
| 4132 | GGTAGTAGCCAATTTGGT | NC_045512.2 | 3′→5′ | 28518 | 28535 |
| 4133 | CGGTAGTAGCCAATTTGG | NC_045512.2 | 3′→5′ | 28519 | 28536 |
| 4134 | TCGGTAGTAGCCAATTTG | NC_045512.2 | 3′→5′ | 28520 | 28537 |
| 4135 | TTCGGTAGTAGCCAATTT | NC_045512.2 | 3′→5′ | 28521 | 28538 |
| 4136 | CTTCGGTAGTAGCCAATT | NC_045512.2 | 3′→5′ | 28522 | 28539 |
| 4137 | TCTTCGGTAGTAGCCAAT | NC_045512.2 | 3′→5′ | 28523 | 28540 |
| 4138 | CTCTTCGGTAGTAGCCAA | NC_045512.2 | 3′→5′ | 28524 | 28541 |
| 4139 | GCTCTTCGGTAGTAGCCA | NC_045512.2 | 3′→5′ | 28525 | 28542 |
| 4140 | AGCTCTTCGGTAGTAGCC | NC_045512.2 | 3′→5′ | 28526 | 28543 |
| 4141 | TAGCTCTTCGGTAGTAGC | NC_045512.2 | 3′→5′ | 28527 | 28544 |
| 4142 | GTAGCTCTTCGGTAGTAG | NC_045512.2 | 3′→5′ | 28528 | 28545 |
| 4143 | GGTAGCTCTTCGGTAGTA | NC_045512.2 | 3′→5′ | 28529 | 28546 |
| 4144 | CAAGGCTCCCTCAGTTGC | NC_045512.2 | 3′→5′ | 28673 | 28690 |
| 4145 | TCAAGGCTCCCTCAGTTG | NC_045512.2 | 3′→5′ | 28674 | 28691 |
| 4146 | TTCAAGGCTCCCTCAGTT | NC_045512.2 | 3′→5′ | 28675 | 28692 |
| 4147 | ATTGCGGGTGCCAATGTG | NC_045512.2 | 3′→5′ | 28706 | 28723 |
| 4148 | GATTGCGGGTGCCAATGT | NC_045512.2 | 3′→5′ | 28707 | 28724 |
| 4149 | GGATTGCGGGTGCCAATG | NC_045512.2 | 3′→5′ | 28708 | 28725 |
| 4150 | AGGATTGCGGGTGCCAAT | NC_045512.2 | 3′→5′ | 28709 | 28726 |
| 4151 | TGAGGAAGTTGTAGCACG | NC_045512.2 | 3′→5′ | 28744 | 28761 |
| 4152 | TTGAGGAAGTTGTAGCAC | NC_045512.2 | 3′→5′ | 28745 | 28762 |
| 4153 | CTTGAGGAAGTTGTAGCA | NC_045512.2 | 3′→5′ | 28746 | 28763 |
| 4154 | CCTTGAGGAAGTTGTAGC | NC_045512.2 | 3′→5′ | 28747 | 28764 |
| 4155 | TCCTTGAGGAAGTTGTAG | NC_045512.2 | 3′→5′ | 28748 | 28765 |
| 4156 | TTCCTTGAGGAAGTTGTA | NC_045512.2 | 3′→5′ | 28749 | 28766 |
| 4157 | GTTCCTTGAGGAAGTTGT | NC_045512.2 | 3′→5′ | 28750 | 28767 |
| 4158 | TGTTCCTTGAGGAAGTTG | NC_045512.2 | 3′→5′ | 28751 | 28768 |
| 4159 | TTGTTCCTTGAGGAAGTT | NC_045512.2 | 3′→5′ | 28752 | 28769 |
| 4160 | GTTGTTCCTTGAGGAAGT | NC_045512.2 | 3′→5′ | 28753 | 28770 |
| 4161 | TGTTGTTCCTTGAGGAAG | NC_045512.2 | 3′→5′ | 28754 | 28771 |
| 4162 | ATGTTGTTCCTTGAGGAA | NC_045512.2 | 3′→5′ | 28755 | 28772 |
| 4163 | AATGTTGTTCCTTGAGGA | NC_045512.2 | 3′→5′ | 28756 | 28773 |
| 4164 | CAATGTTGTTCCTTGAGG | NC_045512.2 | 3′→5′ | 28757 | 28774 |
| 4165 | GCAATGTTGTTCCTTGAG | NC_045512.2 | 3′→5′ | 28758 | 28775 |
| 4166 | GGCAATGTTGTTCCTTGA | NC_045512.2 | 3′→5′ | 28759 | 28776 |
| 4167 | TGGCAATGTTGTTCCTTG | NC_045512.2 | 3′→5′ | 28760 | 28777 |
| 4168 | TTGGCAATGTTGTTCCTT | NC_045512.2 | 3′→5′ | 28761 | 28778 |
| 4169 | TTTGGCAATGTTGTTCCT | NC_045512.2 | 3′→5′ | 28762 | 28779 |
| 4170 | TTTTGGCAATGTTGTTCC | NC_045512.2 | 3′→5′ | 28763 | 28780 |
| 4171 | CTTTTGGCAATGTTGTTC | NC_045512.2 | 3′→5′ | 28764 | 28781 |
| 4172 | CCTTTTGGCAATGTTGTT | NC_045512.2 | 3′→5′ | 28765 | 28782 |
| 4173 | GCCTTTTGGCAATGTTGT | NC_045512.2 | 3′→5′ | 28766 | 28783 |
| 4174 | AGCCTTTTGGCAATGTTG | NC_045512.2 | 3′→5′ | 28767 | 28784 |
| 4175 | AAGCCTTTTGGCAATGTT | NC_045512.2 | 3′→5′ | 28768 | 28785 |
| 4176 | GAAGCCTTTTGGCAATGT | NC_045512.2 | 3′→5′ | 28769 | 28786 |
| 4177 | AGAAGCCTTTTGGCAATG | NC_045512.2 | 3′→5′ | 28770 | 28787 |
| 4178 | TAGAAGCCTTTTGGCAAT | NC_045512.2 | 3′→5′ | 28771 | 28788 |
| 4179 | GTAGAAGCCTTTTGGCAA | NC_045512.2 | 3′→5′ | 28772 | 28789 |
| 4180 | CGTAGAAGCCTTTTGGCA | NC_045512.2 | 3′→5′ | 28773 | 28790 |
| 4181 | GCGTAGAAGCCTTTTGGC | NC_045512.2 | 3′→5′ | 28774 | 28791 |
| 4182 | TGCGTAGAAGCCTTTTGG | NC_045512.2 | 3′→5′ | 28775 | 28792 |
| 4183 | CTGCGTAGAAGCCTTTTG | NC_045512.2 | 3′→5′ | 28776 | 28793 |
| 4184 | TCTGCGTAGAAGCCTTTT | NC_045512.2 | 3′→5′ | 28777 | 28794 |
| 4185 | TTGACTGCCGCCTCTGCT | NC_045512.2 | 3′→5′ | 28799 | 28816 |
| 4186 | CTTGACTGCCGCCTCTGC | NC_045512.2 | 3′→5′ | 28800 | 28817 |
| 4187 | GCTTGACTGCCGCCTCTG | NC_045512.2 | 3′→5′ | 28801 | 28818 |
| 4188 | GGCTTGACTGCCGCCTCT | NC_045512.2 | 3′→5′ | 28802 | 28819 |
| 4189 | AGGCTTGACTGCCGCCTC | NC_045512.2 | 3′→5′ | 28803 | 28820 |
| 4190 | GAGGCTTGACTGCCGCCT | NC_045512.2 | 3′→5′ | 28804 | 28821 |
| 4191 | AGAGGCTTGACTGCCGCC | NC_045512.2 | 3′→5′ | 28805 | 28822 |
| 4192 | AAGAGGCTTGACTGCCGC | NC_045512.2 | 3′→5′ | 28806 | 28823 |
| 4193 | GAAGAGGCTTGACTGCCG | NC_045512.2 | 3′→5′ | 28807 | 28824 |
| 4194 | AGAAGAGGCTTGACTGCC | NC_045512.2 | 3′→5′ | 28808 | 28825 |
| 4195 | GAGAAGAGGCTTGACTGC | NC_045512.2 | 3′→5′ | 28809 | 28826 |
| 4196 | CGAGAAGAGGCTTGACTG | NC_045512.2 | 3′→5′ | 28810 | 28827 |
| 4197 | GGAGTTGAATTTCTTGAA | NC_045512.2 | 3′→5′ | 28852 | 28869 |
| 4198 | AAGCTGGTTCAATCTGTC | NC_045512.2 | 3′→5′ | 28946 | 28963 |
| 4199 | CAAGCTGGTTCAATCTGT | NC_045512.2 | 3′→5′ | 28947 | 28964 |
| 4200 | TCAAGCTGGTTCAATCTG | NC_045512.2 | 3′→5′ | 28948 | 28965 |
| 4201 | CTCAAGCTGGTTCAATCT | NC_045512.2 | 3′→5′ | 28949 | 28966 |
| 4202 | TCTCAAGCTGGTTCAATC | NC_045512.2 | 3′→5′ | 28950 | 28967 |
| 4203 | CTCTCAAGCTGGTTCAAT | NC_045512.2 | 3′→5′ | 28951 | 28968 |
| 4204 | GCTCTCAAGCTGGTTCAA | NC_045512.2 | 3′→5′ | 28952 | 28969 |
| 4205 | TGCTCTCAAGCTGGTTCA | NC_045512.2 | 3′→5′ | 28953 | 28970 |
| 4206 | TTGCTCTCAAGCTGGTTC | NC_045512.2 | 3′→5′ | 28954 | 28971 |
| 4207 | TTTGCTCTCAAGCTGGTT | NC_045512.2 | 3′→5′ | 28955 | 28972 |
| 4208 | TTGTTGGCCTTTACCAGA | NC_045512.2 | 3′→5′ | 28976 | 28993 |
| 4209 | GTTGTTGGCCTTTACCAG | NC_045512.2 | 3′→5′ | 28977 | 28994 |
| 4210 | TGTTGTTGGCCTTTACCA | NC_045512.2 | 3′→5′ | 28978 | 28995 |
| 4211 | TTGTTGTTGGCCTTTACC | NC_045512.2 | 3′→5′ | 28979 | 28996 |
| 4212 | GTTGTTGTTGGCCTTTAC | NC_045512.2 | 3′→5′ | 28980 | 28997 |
| 4213 | TGTTGTTGTTGGCCTTTA | NC_045512.2 | 3′→5′ | 28981 | 28998 |
| 4214 | TTGTTGTTGTTGGCCTTT | NC_045512.2 | 3′→5′ | 28982 | 28999 |
| 4215 | CTTGTTGTTGTTGGCCTT | NC_045512.2 | 3′→5′ | 28983 | 29000 |
| 4216 | CCTTGTTGTTGTTGGCCT | NC_045512.2 | 3′→5′ | 28984 | 29001 |
| 4217 | GCCTTGTTGTTGTTGGCC | NC_045512.2 | 3′→5′ | 28985 | 29002 |
| 4218 | GGCCTTGTTGTTGTTGGC | NC_045512.2 | 3′→5′ | 28986 | 29003 |
| 4219 | TGGCCTTGTTGTTGTTGG | NC_045512.2 | 3′→5′ | 28987 | 29004 |
| 4220 | TTGGCCTTGTTGTTGTTG | NC_045512.2 | 3′→5′ | 28988 | 29005 |
| 4221 | TTTGGCCTTGTTGTTGTT | NC_045512.2 | 3′→5′ | 28989 | 29006 |
| 4222 | GTTTGGCCTTGTTGTTGT | NC_045512.2 | 3′→5′ | 28990 | 29007 |
| 4223 | AGTTTGGCCTTGTTGTTG | NC_045512.2 | 3′→5′ | 28991 | 29008 |
| 4224 | CAGTTTGGCCTTGTTGTT | NC_045512.2 | 3′→5′ | 28992 | 29009 |
| 4225 | ACAGTTTGGCCTTGTTGT | NC_045512.2 | 3′→5′ | 28993 | 29010 |
| 4226 | GACAGTTTGGCCTTGTTG | NC_045512.2 | 3′→5′ | 28994 | 29011 |
| 4227 | TGACAGTTTGGCCTTGTT | NC_045512.2 | 3′→5′ | 28995 | 29012 |
| 4228 | GTGACAGTTTGGCCTTGT | NC_045512.2 | 3′→5′ | 28996 | 29013 |
| 4229 | AGTGACAGTTTGGCCTTG | NC_045512.2 | 3′→5′ | 28997 | 29014 |
| 4230 | TAGTGACAGTTTGGCCTT | NC_045512.2 | 3′→5′ | 28998 | 29015 |
| 4231 | TTAGTGACAGTTTGGCCT | NC_045512.2 | 3′→5′ | 28999 | 29016 |
| 4232 | CTTAGTGACAGTTTGGCC | NC_045512.2 | 3′→5′ | 29000 | 29017 |
| 4233 | TCTTAGTGACAGTTTGGC | NC_045512.2 | 3′→5′ | 29001 | 29018 |
| 4234 | TTCTTAGTGACAGTTTGG | NC_045512.2 | 3′→5′ | 29002 | 29019 |
| 4235 | TTTCTTAGTGACAGTTTG | NC_045512.2 | 3′→5′ | 29003 | 29020 |
| 4236 | ATTTCTTAGTGACAGTTT | NC_045512.2 | 3′→5′ | 29004 | 29021 |
| 4237 | GATTTCTTAGTGACAGTT | NC_045512.2 | 3′→5′ | 29005 | 29022 |
| 4238 | AGATTTCTTAGTGACAGT | NC_045512.2 | 3′→5′ | 29006 | 29023 |
| 4239 | CAGATTTCTTAGTGACAG | NC_045512.2 | 3′→5′ | 29007 | 29024 |
| 4240 | GCAGATTTCTTAGTGACA | NC_045512.2 | 3′→5′ | 29008 | 29025 |
| 4241 | AGCAGATTTCTTAGTGAC | NC_045512.2 | 3′→5′ | 29009 | 29026 |
| 4242 | CAGCAGATTTCTTAGTGA | NC_045512.2 | 3′→5′ | 29010 | 29027 |
| 4243 | GCAGCAGATTTCTTAGTG | NC_045512.2 | 3′→5′ | 29011 | 29028 |
| 4244 | AGCAGCAGATTTCTTAGT | NC_045512.2 | 3′→5′ | 29012 | 29029 |
| 4245 | CAGCAGCAGATTTCTTAG | NC_045512.2 | 3′→5′ | 29013 | 29030 |
| 4246 | TCAGCAGCAGATTTCTTA | NC_045512.2 | 3′→5′ | 29014 | 29031 |
| 4247 | CTCAGCAGCAGATTTCTT | NC_045512.2 | 3′→5′ | 29015 | 29032 |
| 4248 | CCTCAGCAGCAGATTTCT | NC_045512.2 | 3′→5′ | 29016 | 29033 |
| 4249 | GCCTCAGCAGCAGATTTC | NC_045512.2 | 3′→5′ | 29017 | 29034 |
| 4250 | AGTTCCTTGTCTGATTAG | NC_045512.2 | 3′→5′ | 29144 | 29161 |
| 4251 | CAGTTCCTTGTCTGATTA | NC_045512.2 | 3′→5′ | 29145 | 29162 |
| 4252 | TCAGTTCCTTGTCTGATT | NC_045512.2 | 3′→5′ | 29146 | 29163 |
| 4253 | ATCAGTTCCTTGTCTGAT | NC_045512.2 | 3′→5′ | 29147 | 29164 |
| 4254 | AATCAGTTCCTTGTCTGA | NC_045512.2 | 3′→5′ | 29148 | 29165 |
| 4255 | TAATCAGTTCCTTGTCTG | NC_045512.2 | 3′→5′ | 29149 | 29166 |
| 4256 | GTAATCAGTTCCTTGTCT | NC_045512.2 | 3′→5′ | 29150 | 29167 |
| 4257 | TGTAATCAGTTCCTTGTC | NC_045512.2 | 3′→5′ | 29151 | 29168 |
| 4258 | TTGTAATCAGTTCCTTGT | NC_045512.2 | 3′→5′ | 29152 | 29169 |
| 4259 | TTTGTAATCAGTTCCTTG | NC_045512.2 | 3′→5′ | 29153 | 29170 |
| 4260 | GTTTGTAATCAGTTCCTT | NC_045512.2 | 3′→5′ | 29154 | 29171 |
| 4261 | TGTTTGTAATCAGTTCCT | NC_045512.2 | 3′→5′ | 29155 | 29172 |
| 4262 | TTGTGCAATTTGCGGCCA | NC_045512.2 | 3′→5′ | 29174 | 29191 |
| 4263 | ATTGTGCAATTTGCGGCC | NC_045512.2 | 3′→5′ | 29175 | 29192 |
| 4264 | AATTGTGCAATTTGCGGC | NC_045512.2 | 3′→5′ | 29176 | 29193 |
| 4265 | AAATTGTGCAATTTGCGG | NC_045512.2 | 3′→5′ | 29177 | 29194 |
| 4266 | CAAATTGTGCAATTTGCG | NC_045512.2 | 3′→5′ | 29178 | 29195 |
| 4267 | GCAAATTGTGCAATTTGC | NC_045512.2 | 3′→5′ | 29179 | 29196 |
| 4268 | GACTTCCATGCCAATGCG | NC_045512.2 | 3′→5′ | 29228 | 29245 |
| 4269 | TGACTTCCATGCCAATGC | NC_045512.2 | 3′→5′ | 29229 | 29246 |
| 4270 | GTGACTTCCATGCCAATG | NC_045512.2 | 3′→5′ | 29230 | 29247 |
| 4271 | TGTGACTTCCATGCCAAT | NC_045512.2 | 3′→5′ | 29231 | 29248 |
| 4272 | GTGTGACTTCCATGCCAA | NC_045512.2 | 3′→5′ | 29232 | 29249 |
| 4273 | GGTGTGACTTCCATGCCA | NC_045512.2 | 3′→5′ | 29233 | 29250 |
| 4274 | AGGTGTGACTTCCATGCC | NC_045512.2 | 3′→5′ | 29234 | 29251 |
| 4275 | AAGGTGTGACTTCCATGC | NC_045512.2 | 3′→5′ | 29235 | 29252 |
| 4276 | GAAGGTGTGACTTCCATG | NC_045512.2 | 3′→5′ | 29236 | 29253 |
| 4277 | CGAAGGTGTGACTTCCAT | NC_045512.2 | 3′→5′ | 29237 | 29254 |
| 4278 | CCGAAGGTGTGACTTCCA | NC_045512.2 | 3′→5′ | 29238 | 29255 |
| 4279 | CCCGAAGGTGTGACTTCC | NC_045512.2 | 3′→5′ | 29239 | 29256 |
| 4280 | TCCCGAAGGTGTGACTTC | NC_045512.2 | 3′→5′ | 29240 | 29257 |
| 4281 | TTCCCGAAGGTGTGACTT | NC_045512.2 | 3′→5′ | 29241 | 29258 |
| 4282 | GTTCCCGAAGGTGTGACT | NC_045512.2 | 3′→5′ | 29242 | 29259 |
| 4283 | ATCTTTGTCATCCAATTT | NC_045512.2 | 3′→5′ | 29285 | 29302 |
| 4284 | GATCTTTGTCATCCAATT | NC_045512.2 | 3′→5′ | 29286 | 29303 |
| 4285 | GGATCTTTGTCATCCAAT | NC_045512.2 | 3′→5′ | 29287 | 29304 |
| 4286 | TGGATCTTTGTCATCCAA | NC_045512.2 | 3′→5′ | 29288 | 29305 |
| 4287 | TGTTTTGTATGCGTCAAT | NC_045512.2 | 3′→5′ | 29342 | 29359 |
| 4288 | ATGTTTTGTATGCGTCAA | NC_045512.2 | 3′→5′ | 29343 | 29360 |
| 4289 | AATGTTTTGTATGCGTCA | NC_045512.2 | 3′→5′ | 29344 | 29361 |
| 4290 | GAATGTTTTGTATGCGTC | NC_045512.2 | 3′→5′ | 29345 | 29362 |
| 4291 | GGAATGTTTTGTATGCGT | NC_045512.2 | 3′→5′ | 29346 | 29363 |
| 4292 | GGGAATGTTTTGTATGCG | NC_045512.2 | 3′→5′ | 29347 | 29364 |
| 4293 | TGGGAATGTTTTGTATGC | NC_045512.2 | 3′→5′ | 29348 | 29365 |
| 4294 | GTGGGAATGTTTTGTATG | NC_045512.2 | 3′→5′ | 29349 | 29366 |
| 4295 | GGTGGGAATGTTTTGTAT | NC_045512.2 | 3′→5′ | 29350 | 29367 |
| 4296 | TGGTGGGAATGTTTTGTA | NC_045512.2 | 3′→5′ | 29351 | 29368 |
| 4297 | TTGGTGGGAATGTTTTGT | NC_045512.2 | 3′→5′ | 29352 | 29369 |
| 4298 | GTTGGTGGGAATGTTTTG | NC_045512.2 | 3′→5′ | 29353 | 29370 |
| 4299 | TGTTGGTGGGAATGTTTT | NC_045512.2 | 3′→5′ | 29354 | 29371 |
| 4300 | CTGTTGGTGGGAATGTTT | NC_045512.2 | 3′→5′ | 29355 | 29372 |
| 4301 | TCTGTTGGTGGGAATGTT | NC_045512.2 | 3′→5′ | 29356 | 29373 |
| 4302 | CTCTGTTGGTGGGAATGT | NC_045512.2 | 3′→5′ | 29357 | 29374 |
| 4303 | GCTCTGTTGGTGGGAATG | NC_045512.2 | 3′→5′ | 29358 | 29375 |
| 4304 | GGCTCTGTTGGTGGGAAT | NC_045512.2 | 3′→5′ | 29359 | 29376 |
| 4305 | AGGCTCTGTTGGTGGGAA | NC_045512.2 | 3′→5′ | 29360 | 29377 |
| 4306 | TAGGCTCTGTTGGTGGGA | NC_045512.2 | 3′→5′ | 29361 | 29378 |
| 4307 | TTAGGCTCTGTTGGTGGG | NC_045512.2 | 3′→5′ | 29362 | 29379 |
| 4308 | TTTAGGCTCTGTTGGTGG | NC_045512.2 | 3′→5′ | 29363 | 29380 |
| 4309 | TTTTAGGCTCTGTTGGTG | NC_045512.2 | 3′→5′ | 29364 | 29381 |
| 4310 | TTTTTAGGCTCTGTTGGT | NC_045512.2 | 3′→5′ | 29365 | 29382 |
| 4311 | CTTTTTAGGCTCTGTTGG | NC_045512.2 | 3′→5′ | 29366 | 29383 |
| 4312 | CCTTTTTAGGCTCTGTTG | NC_045512.2 | 3′→5′ | 29367 | 29384 |
| 4313 | TCCTTTTTAGGCTCTGTT | NC_045512.2 | 3′→5′ | 29368 | 29385 |
| 4314 | GTCCTTTTTAGGCTCTGT | NC_045512.2 | 3′→5′ | 29369 | 29386 |
| 4315 | TGTCCTTTTTAGGCTCTG | NC_045512.2 | 3′→5′ | 29370 | 29387 |
| 4316 | TTGTCCTTTTTAGGCTCT | NC_045512.2 | 3′→5′ | 29371 | 29388 |
| 4317 | TTTGTCCTTTTTAGGCTC | NC_045512.2 | 3′→5′ | 29372 | 29389 |
| 4318 | TTTTGTCCTTTTTAGGCT | NC_045512.2 | 3′→5′ | 29373 | 29390 |
| 4319 | TTTTTGTCCTTTTTAGGC | NC_045512.2 | 3′→5′ | 29374 | 29391 |
| 4320 | CTTTTTGTCCTTTTTAGG | NC_045512.2 | 3′→5′ | 29375 | 29392 |
| 4321 | TCTTTTTGTCCTTTTTAG | NC_045512.2 | 3′→5′ | 29376 | 29393 |
| 4322 | TTCTTTTTGTCCTTTTTA | NC_045512.2 | 3′→5′ | 29377 | 29394 |
| 4323 | AGGAAGAAGAGTCACAGT | NC_045512.2 | 3′→5′ | 29444 | 29461 |
| 4324 | CAGGAAGAAGAGTCACAG | NC_045512.2 | 3′→5′ | 29445 | 29462 |
| 4325 | GCAGGAAGAAGAGTCACA | NC_045512.2 | 3′→5′ | 29446 | 29463 |
| 4326 | CATCTGCCTTGTGTGGTC | NC_045512.2 | 3′→5′ | 29543 | 29560 |
| 4327 | CCATCTGCCTTGTGTGGT | NC_045512.2 | 3′→5′ | 29544 | 29561 |
| 4328 | CCCATCTGCCTTGTGTGG | NC_045512.2 | 3′→5′ | 29545 | 29562 |
| 4329 | GCCCATCTGCCTTGTGTG | NC_045512.2 | 3′→5′ | 29546 | 29563 |
| 4330 | AGCCCATCTGCCTTGTGT | NC_045512.2 | 3′→5′ | 29547 | 29564 |
| 4331 | TAGCCCATCTGCCTTGTG | NC_045512.2 | 3′→5′ | 29548 | 29565 |
| 4332 | ATAGCCCATCTGCCTTGT | NC_045512.2 | 3′→5′ | 29549 | 29566 |
| 4333 | TGCACAAGAGTAGACTAT | NC_045512.2 | 3′→5′ | 29598 | 29615 |
| 4334 | CTGCACAAGAGTAGACTA | NC_045512.2 | 3′→5′ | 29599 | 29616 |
| 4335 | TCTGCACAAGAGTAGACT | NC_045512.2 | 3′→5′ | 29600 | 29617 |
| 4336 | TTCTGCACAAGAGTAGAC | NC_045512.2 | 3′→5′ | 29601 | 29618 |
| 4337 | ATTCTGCACAAGAGTAGA | NC_045512.2 | 3′→5′ | 29602 | 29619 |
| 4338 | CATTCTGCACAAGAGTAG | NC_045512.2 | 3′→5′ | 29603 | 29620 |
| 4339 | TCATTCTGCACAAGAGTA | NC_045512.2 | 3′→5′ | 29604 | 29621 |
| 4340 | TTCATTCTGCACAAGAGT | NC_045512.2 | 3′→5′ | 29605 | 29622 |
| 4341 | ATTCATTCTGCACAAGAG | NC_045512.2 | 3′→5′ | 29606 | 29623 |
| 4342 | AATTCATTCTGCACAAGA | NC_045512.2 | 3′→5′ | 29607 | 29624 |
| 4343 | GAATTCATTCTGCACAAG | NC_045512.2 | 3′→5′ | 29608 | 29625 |
| 4344 | AGAATTCATTCTGCACAA | NC_045512.2 | 3′→5′ | 29609 | 29626 |
| 4345 | GAGAATTCATTCTGCACA | NC_045512.2 | 3′→5′ | 29610 | 29627 |
| 4346 | CGAGAATTCATTCTGCAC | NC_045512.2 | 3′→5′ | 29611 | 29628 |
| 4347 | ACGAGAATTCATTCTGCA | NC_045512.2 | 3′→5′ | 29612 | 29629 |
| 4348 | TACGAGAATTCATTCTGC | NC_045512.2 | 3′→5′ | 29613 | 29630 |
| 4349 | TGAGATTAAAGTTAACTA | NC_045512.2 | 3′→5′ | 29652 | 29669 |
| 4350 | GTGAGATTAAAGTTAACT | NC_045512.2 | 3′→5′ | 29653 | 29670 |
| 4351 | TGTGAGATTAAAGTTAAC | NC_045512.2 | 3′→5′ | 29654 | 29671 |
| 4352 | ATGTGAGATTAAAGTTAA | NC_045512.2 | 3′→5′ | 29655 | 29672 |
| 4353 | TATGTGAGATTAAAGTTA | NC_045512.2 | 3′→5′ | 29656 | 29673 |
| 4354 | CTATGTGAGATTAAAGTT | NC_045512.2 | 3′→5′ | 29657 | 29674 |
| 4355 | GCTATGTGAGATTAAAGT | NC_045512.2 | 3′→5′ | 29658 | 29675 |
| 4356 | TGCTATGTGAGATTAAAG | NC_045512.2 | 3′→5′ | 29659 | 29676 |
| 4357 | TTGCTATGTGAGATTAAA | NC_045512.2 | 3′→5′ | 29660 | 29677 |
| 4358 | ATTGCTATGTGAGATTAA | NC_045512.2 | 3′→5′ | 29661 | 29678 |
| 4359 | GATTGCTATGTGAGATTA | NC_045512.2 | 3′→5′ | 29662 | 29679 |
| 4360 | AGATTGCTATGTGAGATT | NC_045512.2 | 3′→5′ | 29663 | 29680 |
| 4361 | AAGATTGCTATGTGAGAT | NC_045512.2 | 3′→5′ | 29664 | 29681 |
| 4362 | AAAGATTGCTATGTGAGA | NC_045512.2 | 3′→5′ | 29665 | 29682 |
| 4363 | TAAAGATTGCTATGTGAG | NC_045512.2 | 3′→5′ | 29666 | 29683 |
| 4364 | TTAAAGATTGCTATGTGA | NC_045512.2 | 3′→5′ | 29667 | 29684 |
| 4365 | ATTAAAGATTGCTATGTG | NC_045512.2 | 3′→5′ | 29668 | 29685 |
| 4366 | GATTAAAGATTGCTATGT | NC_045512.2 | 3′→5′ | 29669 | 29686 |
| 4367 | TGATTAAAGATTGCTATG | NC_045512.2 | 3′→5′ | 29670 | 29687 |
| 4368 | CCTCCCTAATGTTACACA | NC_045512.2 | 3′→5′ | 29689 | 29706 |
| 4369 | TCCTCCCTAATGTTACAC | NC_045512.2 | 3′→5′ | 29690 | 29707 |
| 4370 | GTCCTCCCTAATGTTACA | NC_045512.2 | 3′→5′ | 29691 | 29708 |
| 4371 | AGTCCTCCCTAATGTTAC | NC_045512.2 | 3′→5′ | 29692 | 29709 |
| 4372 | AAGTCCTCCCTAATGTTA | NC_045512.2 | 3′→5′ | 29693 | 29710 |
| 4373 | CAAGTCCTCCCTAATGTT | NC_045512.2 | 3′→5′ | 29694 | 29711 |
| 4374 | TCAAGTCCTCCCTAATGT | NC_045512.2 | 3′→5′ | 29695 | 29712 |
| 4375 | TTCAAGTCCTCCCTAATG | NC_045512.2 | 3′→5′ | 29696 | 29713 |
| 4376 | TTTCAAGTCCTCCCTAAT | NC_045512.2 | 3′→5′ | 29697 | 29714 |
| 4377 | CTTTCAAGTCCTCCCTAA | NC_045512.2 | 3′→5′ | 29698 | 29715 |
| 4378 | TCTTTCAAGTCCTCCCTA | NC_045512.2 | 3′→5′ | 29699 | 29716 |
| 4379 | CTCTTTCAAGTCCTCCCT | NC_045512.2 | 3′→5′ | 29700 | 29717 |
| 4380 | GCTCTTTCAAGTCCTCCC | NC_045512.2 | 3′→5′ | 29701 | 29718 |
| 4381 | GGCTCTTTCAAGTCCTCC | NC_045512.2 | 3′→5′ | 29702 | 29719 |
| 4382 | TGGCTCTTTCAAGTCCTC | NC_045512.2 | 3′→5′ | 29703 | 29720 |
| 4383 | GTGGCTCTTTCAAGTCCT | NC_045512.2 | 3′→5′ | 29704 | 29721 |
| 4384 | GGTGGCTCTTTCAAGTCC | NC_045512.2 | 3′→5′ | 29705 | 29722 |
| 4385 | TGGTGGCTCTTTCAAGTC | NC_045512.2 | 3′→5′ | 29706 | 29723 |
| 4386 | GTGGTGGCTCTTTCAAGT | NC_045512.2 | 3′→5′ | 29707 | 29724 |
| 4387 | TGTGGTGGCTCTTTCAAG | NC_045512.2 | 3′→5′ | 29708 | 29725 |
| 4388 | ATGTGGTGGCTCTTTCAA | NC_045512.2 | 3′→5′ | 29709 | 29726 |
| 4389 | AATGTGGTGGCTCTTTCA | NC_045512.2 | 3′→5′ | 29710 | 29727 |
| 4390 | AAATGTGGTGGCTCTTTC | NC_045512.2 | 3′→5′ | 29711 | 29728 |
| 4391 | AAAATGTGGTGGCTCTTT | NC_045512.2 | 3′→5′ | 29712 | 29729 |
| 4392 | GAAAATGTGGTGGCTCTT | NC_045512.2 | 3′→5′ | 29713 | 29730 |
| 4393 | TGAAAATGTGGTGGCTCT | NC_045512.2 | 3′→5′ | 29714 | 29731 |
| 4394 | GTACTCCGCGTGGCCTCG | NC_045512.2 | 3′→5′ | 29733 | 29750 |
| 4395 | CGTACTCCGCGTGGCCTC | NC_045512.2 | 3′→5′ | 29734 | 29751 |
| 4396 | TCGTACTCCGCGTGGCCT | NC_045512.2 | 3′→5′ | 29735 | 29752 |
| 4397 | ATCGTACTCCGCGTGGCC | NC_045512.2 | 3′→5′ | 29736 | 29753 |
| 4398 | GATCGTACTCCGCGTGGC | NC_045512.2 | 3′→5′ | 29737 | 29754 |
| 4399 | CGATCGTACTCCGCGTGG | NC_045512.2 | 3′→5′ | 29738 | 29755 |
| 4400 | TCGATCGTACTCCGCGTG | NC_045512.2 | 3′→5′ | 29739 | 29756 |
| 4401 | CTCGATCGTACTCCGCGT | NC_045512.2 | 3′→5′ | 29740 | 29757 |
| 4402 | GCAGCTCTCCCTAGCATT | NC_045512.2 | 3′→5′ | 29770 | 29787 |
| 4403 | GGCAGCTCTCCCTAGCAT | NC_045512.2 | 3′→5′ | 29771 | 29788 |
| 4404 | AGGCAGCTCTCCCTAGCA | NC_045512.2 | 3′→5′ | 29772 | 29789 |
| 4405 | TAGGCAGCTCTCCCTAGC | NC_045512.2 | 3′→5′ | 29773 | 29790 |
| 4406 | ATAGGCAGCTCTCCCTAG | NC_045512.2 | 3′→5′ | 29774 | 29791 |
| 4407 | TATAGGCAGCTCTCCCTA | NC_045512.2 | 3′→5′ | 29775 | 29792 |
| 4408 | ATATAGGCAGCTCTCCCT | NC_045512.2 | 3′→5′ | 29776 | 29793 |
| 4409 | CATATAGGCAGCTCTCCC | NC_045512.2 | 3′→5′ | 29777 | 29794 |
| 4410 | CCATATAGGCAGCTCTCC | NC_045512.2 | 3′→5′ | 29778 | 29795 |
| 4411 | TCCATATAGGCAGCTCTC | NC_045512.2 | 3′→5′ | 29779 | 29796 |
| 4412 | TTCCATATAGGCAGCTCT | NC_045512.2 | 3′→5′ | 29780 | 29797 |
| 4413 | CTTCCATATAGGCAGCTC | NC_045512.2 | 3′→5′ | 29781 | 29798 |
| 4414 | TCTTCCATATAGGCAGCT | NC_045512.2 | 3′→5′ | 29782 | 29799 |
| 4415 | CTCTTCCATATAGGCAGC | NC_045512.2 | 3′→5′ | 29783 | 29800 |
| 4416 | GCTCTTCCATATAGGCAG | NC_045512.2 | 3′→5′ | 29784 | 29801 |
| 4417 | GGCTCTTCCATATAGGCA | NC_045512.2 | 3′→5′ | 29785 | 29802 |
| 4418 | GGGCTCTTCCATATAGGC | NC_045512.2 | 3′→5′ | 29786 | 29803 |
| 4419 | AGGGCTCTTCCATATAGG | NC_045512.2 | 3′→5′ | 29787 | 29804 |
| 4420 | TAGGGCTCTTCCATATAG | NC_045512.2 | 3′→5′ | 29788 | 29805 |
| 4421 | TTAGGGCTCTTCCATATA | NC_045512.2 | 3′→5′ | 29789 | 29806 |
| 4422 | ATTAGGGCTCTTCCATAT | NC_045512.2 | 3′→5′ | 29790 | 29807 |
| 4423 | CATTAGGGCTCTTCCATA | NC_045512.2 | 3′→5′ | 29791 | 29808 |
| 4424 | ACATTAGGGCTCTTCCAT | NC_045512.2 | 3′→5′ | 29792 | 29809 |
| 4425 | CACATTAGGGCTCTTCCA | NC_045512.2 | 3′→5′ | 29793 | 29810 |
| 4426 | ACACATTAGGGCTCTTCC | NC_045512.2 | 3′→5′ | 29794 | 29811 |
| 4427 | TACACATTAGGGCTCTTC | NC_045512.2 | 3′→5′ | 29795 | 29812 |
| 4428 | TTACACATTAGGGCTCTT | NC_045512.2 | 3′→5′ | 29796 | 29813 |
| 4429 | TTTACACATTAGGGCTCT | NC_045512.2 | 3′→5′ | 29797 | 29814 |
| 4430 | TTTTACACATTAGGGCTC | NC_045512.2 | 3′→5′ | 29798 | 29815 |
| 4431 | ATTTTACACATTAGGGCT | NC_045512.2 | 3′→5′ | 29799 | 29816 |
| 4432 | AATTTTACACATTAGGGC | NC_045512.2 | 3′→5′ | 29800 | 29817 |
| 4433 | TAATTTTACACATTAGGG | NC_045512.2 | 3′→5′ | 29801 | 29818 |
| 4434 | TTAATTTTACACATTAGG | NC_045512.2 | 3′→5′ | 29802 | 29819 |
| 4435 | ATTAATTTTACACATTAG | NC_045512.2 | 3′→5′ | 29803 | 29820 |
| 4436 | AATTAATTTTACACATTA | NC_045512.2 | 3′→5′ | 29804 | 29821 |
| 4437 | AAATTAATTTTACACATT | NC_045512.2 | 3′→5′ | 29805 | 29822 |
| 4438 | AAAATTAATTTTACACAT | NC_045512.2 | 3′→5′ | 29806 | 29823 |
| 4439 | TAAAATTAATTTTACACA | NC_045512.2 | 3′→5′ | 29807 | 29824 |
| 4440 | CTAAAATTAATTTTACAC | NC_045512.2 | 3′→5′ | 29808 | 29825 |
| 4441 | ACTAAAATTAATTTTACA | NC_045512.2 | 3′→5′ | 29809 | 29826 |
| 4442 | TACTAAAATTAATTTTAC | NC_045512.2 | 3′→5′ | 29810 | 29827 |
| 4443 | CTACTAAAATTAATTTTA | NC_045512.2 | 3′→5′ | 29811 | 29828 |
| 4444 | ACGGACGAAACCGTAAGCAG | NC_045512.2 | 3′→5′ | 190 | 209 |
| 4445 | CACGGACGAAACCGTAAGCA | NC_045512.2 | 3′→5′ | 191 | 210 |
| 4446 | ACACGGACGAAACCGTAAGC | NC_045512.2 | 3′→5′ | 192 | 211 |
| 4447 | AACACGGACGAAACCGTAAG | NC_045512.2 | 3′→5′ | 193 | 212 |
| 4448 | CAACACGGACGAAACCGTAA | NC_045512.2 | 3′→5′ | 194 | 213 |
| 4449 | GCAACACGGACGAAACCGTA | NC_045512.2 | 3′→5′ | 195 | 214 |
| 4450 | TGCAACACGGACGAAACCGT | NC_045512.2 | 3′→5′ | 196 | 215 |
| 4451 | CTGCAACACGGACGAAACCG | NC_045512.2 | 3′→5′ | 197 | 216 |
| 4452 | CACACCCGGACGAAACCTAG | NC_045512.2 | 3′→5′ | 233 | 252 |
| 4453 | TCACACCCGGACGAAACCTA | NC_045512.2 | 3′→5′ | 234 | 253 |
| 4454 | GTCACACCCGGACGAAACCT | NC_045512.2 | 3′→5′ | 235 | 254 |
| 4455 | GGTCACACCCGGACGAAACC | NC_045512.2 | 3′→5′ | 236 | 255 |
| 4456 | CGGTCACACCCGGACGAAAC | NC_045512.2 | 3′→5′ | 237 | 256 |
| 4457 | TCGGTCACACCCGGACGAAA | NC_045512.2 | 3′→5′ | 238 | 257 |
| 4458 | TTCGGTCACACCCGGACGAA | NC_045512.2 | 3′→5′ | 239 | 258 |
| 4459 | TTTCGGTCACACCCGGACGA | NC_045512.2 | 3′→5′ | 240 | 259 |
| 4460 | CTTTCGGTCACACCCGGACG | NC_045512.2 | 3′→5′ | 241 | 260 |
| 4461 | CCTTTCGGTCACACCCGGAC | NC_045512.2 | 3′→5′ | 242 | 261 |
| 4462 | ACCTTTCGGTCACACCCGGA | NC_045512.2 | 3′→5′ | 243 | 262 |
| 4463 | TACCTTTCGGTCACACCCGG | NC_045512.2 | 3′→5′ | 244 | 263 |
| 4464 | TTACCTTTCGGTCACACCCG | NC_045512.2 | 3′→5′ | 245 | 264 |
| 4465 | CTTACCTTTCGGTCACACCC | NC_045512.2 | 3′→5′ | 246 | 265 |
| 4466 | TCTTACCTTTCGGTCACACC | NC_045512.2 | 3′→5′ | 247 | 266 |
| 4467 | ATCTTACCTTTCGGTCACAC | NC_045512.2 | 3′→5′ | 248 | 267 |
| 4468 | CATCTTACCTTTCGGTCACA | NC_045512.2 | 3′→5′ | 249 | 268 |
| 4469 | CCATCTTACCTTTCGGTCAC | NC_045512.2 | 3′→5′ | 250 | 269 |
| 4470 | TCCATCTTACCTTTCGGTCA | NC_045512.2 | 3′→5′ | 251 | 270 |
| 4471 | CTCCATCTTACCTTTCGGTC | NC_045512.2 | 3′→5′ | 252 | 271 |
| 4472 | TCTCCATCTTACCTTTCGGT | NC_045512.2 | 3′→5′ | 253 | 272 |
| 4473 | CTCTCCATCTTACCTTTCGG | NC_045512.2 | 3′→5′ | 254 | 273 |
| 4474 | GCTCTCCATCTTACCTTTCG | NC_045512.2 | 3′→5′ | 255 | 274 |
| 4475 | GGCTCTCCATCTTACCTTTC | NC_045512.2 | 3′→5′ | 256 | 275 |
| 4476 | AGGCTCTCCATCTTACCTTT | NC_045512.2 | 3′→5′ | 257 | 276 |
| 4477 | AAGGCTCTCCATCTTACCTT | NC_045512.2 | 3′→5′ | 258 | 277 |
| 4478 | CAAGGCTCTCCATCTTACCT | NC_045512.2 | 3′→5′ | 259 | 278 |
| 4479 | ACAAGGCTCTCCATCTTACC | NC_045512.2 | 3′→5′ | 260 | 279 |
| 4480 | GACGTGTGTTTTCTCGTTGA | NC_045512.2 | 3′→5′ | 288 | 307 |
| 4481 | GGACGTGTGTTTTCTCGTTG | NC_045512.2 | 3′→5′ | 289 | 308 |
| 4482 | TGGACGTGTGTTTTCTCGTT | NC_045512.2 | 3′→5′ | 290 | 309 |
| 4483 | TTGGACGTGTGTTTTCTCGT | NC_045512.2 | 3′→5′ | 291 | 310 |
| 4484 | GTTGGACGTGTGTTTTCTCG | NC_045512.2 | 3′→5′ | 292 | 311 |
| 4485 | AGTTGGACGTGTGTTTTCTC | NC_045512.2 | 3′→5′ | 293 | 312 |
| 4486 | GAGTTGGACGTGTGTTTTCT | NC_045512.2 | 3′→5′ | 294 | 313 |
| 4487 | TGAGTTGGACGTGTGTTTTC | NC_045512.2 | 3′→5′ | 295 | 314 |
| 4488 | CTGAGTTGGACGTGTGTTTT | NC_045512.2 | 3′→5′ | 296 | 315 |
| 4489 | ACTGAGTTGGACGTGTGTTT | NC_045512.2 | 3′→5′ | 297 | 316 |
| 4490 | AACTGAGTTGGACGTGTGTT | NC_045512.2 | 3′→5′ | 298 | 317 |
| 4491 | AAACTGAGTTGGACGTGTGT | NC_045512.2 | 3′→5′ | 299 | 318 |
| 4492 | CAAACTGAGTTGGACGTGTG | NC_045512.2 | 3′→5′ | 300 | 319 |
| 4493 | GCAAACTGAGTTGGACGTGT | NC_045512.2 | 3′→5′ | 301 | 320 |
| 4494 | GGCAAACTGAGTTGGACGTG | NC_045512.2 | 3′→5′ | 302 | 321 |
| 4495 | AGGCAAACTGAGTTGGACGT | NC_045512.2 | 3′→5′ | 303 | 322 |
| 4496 | CAGGCAAACTGAGTTGGACG | NC_045512.2 | 3′→5′ | 304 | 323 |
| 4497 | ACAGGCAAACTGAGTTGGAC | NC_045512.2 | 3′→5′ | 305 | 324 |
| 4498 | AACACATAGGGCTGTTCAAG | NC_045512.2 | 3′→5′ | 455 | 474 |
| 4499 | GAACACATAGGGCTGTTCAA | NC_045512.2 | 3′→5′ | 456 | 475 |
| 4500 | TGAACACATAGGGCTGTTCA | NC_045512.2 | 3′→5′ | 457 | 476 |
| 4501 | ATGAACACATAGGGCTGTTC | NC_045512.2 | 3′→5′ | 458 | 477 |
| 4502 | CCGTTCTTACGAAGAAGAAC | NC_045512.2 | 3′→5′ | 626 | 645 |
| 4503 | ACCGTTCTTACGAAGAAGAA | NC_045512.2 | 3′→5′ | 627 | 646 |
| 4504 | TACCGTTCTTACGAAGAAGA | NC_045512.2 | 3′→5′ | 628 | 647 |
| 4505 | TTACCGTTCTTACGAAGAAG | NC_045512.2 | 3′→5′ | 629 | 648 |
| 4506 | ATTACCGTTCTTACGAAGAA | NC_045512.2 | 3′→5′ | 630 | 649 |
| 4507 | TATTACCGTTCTTACGAAGA | NC_045512.2 | 3′→5′ | 631 | 650 |
| 4508 | TTATTACCGTTCTTACGAAG | NC_045512.2 | 3′→5′ | 632 | 651 |
| 4509 | GGATCAGTGCCAAGCTCGTC | NC_045512.2 | 3′→5′ | 704 | 723 |
| 4510 | CAGTAAGTTTTAAATAACCA | NC_045512.2 | 3′→5′ | 3352 | 3371 |
| 4511 | TCAGTAAGTTTTAAATAACC | NC_045512.2 | 3′→5′ | 3353 | 3372 |
| 4512 | GTCAGTAAGTTTTAAATAAC | NC_045512.2 | 3′→5′ | 3354 | 3373 |
| 4513 | TGTCAGTAAGTTTTAAATAA | NC_045512.2 | 3′→5′ | 3355 | 3374 |
| 4514 | TTGTCAGTAAGTTTTAAATA | NC_045512.2 | 3′→5′ | 3356 | 3375 |
| 4515 | ATTGTCAGTAAGTTTTAAAT | NC_045512.2 | 3′→5′ | 3357 | 3376 |
| 4516 | CATTGTCAGTAAGTTTTAAA | NC_045512.2 | 3′→5′ | 3358 | 3377 |
| 4517 | ACATTGTCAGTAAGTTTTAA | NC_045512.2 | 3′→5′ | 3359 | 3378 |
| 4518 | AGTGCACAAAAGTTAGCAGC | NC_045512.2 | 3′→5′ | 5384 | 5403 |
| 4519 | TTTCCACTACTTCTTCAGAG | NC_045512.2 | 3′→5′ | 6406 | 6425 |
| 4520 | TTTTCCACTACTTCTTCAGA | NC_045512.2 | 3′→5′ | 6407 | 6426 |
| 4521 | ATTTTCCACTACTTCTTCAG | NC_045512.2 | 3′→5′ | 6408 | 6427 |
| 4522 | GATTTTCCACTACTTCTTCA | NC_045512.2 | 3′→5′ | 6409 | 6428 |
| 4523 | GGATTTTCCACTACTTCTTC | NC_045512.2 | 3′→5′ | 6410 | 6429 |
| 4524 | AGGATTTTCCACTACTTCTT | NC_045512.2 | 3′→5′ | 6411 | 6430 |
| 4525 | TAGGATTTTCCACTACTTCT | NC_045512.2 | 3′→5′ | 6412 | 6431 |
| 4526 | GTAGGATTTTCCACTACTTC | NC_045512.2 | 3′→5′ | 6413 | 6432 |
| 4527 | GGTAGGATTTTCCACTACTT | NC_045512.2 | 3′→5′ | 6414 | 6433 |
| 4528 | ACAACTTCGGTAGTTTTCAC | NC_045512.2 | 3′→5′ | 6461 | 6480 |
| 4529 | TACAACTTCGGTAGTTTTCA | NC_045512.2 | 3′→5′ | 6462 | 6481 |
| 4530 | CTACAACTTCGGTAGTTTTC | NC_045512.2 | 3′→5′ | 6463 | 6482 |
| 4531 | CCTACAACTTCGGTAGTTTT | NC_045512.2 | 3′→5′ | 6464 | 6483 |
| 4532 | CCATTAACAATAGTTGTACA | NC_045512.2 | 3′→5′ | 7532 | 7551 |
| 4533 | AAACCAACACTACCACATGA | NC_045512.2 | 3′→5′ | 10484 | 10503 |
| 4534 | AAAACCAACACTACCACATG | NC_045512.2 | 3′→5′ | 10485 | 10504 |
| 4535 | TAAAACCAACACTACCACAT | NC_045512.2 | 3′→5′ | 10486 | 10505 |
| 4536 | TTAAAACCAACACTACCACA | NC_045512.2 | 3′→5′ | 10487 | 10506 |
| 4537 | GTTAAAACCAACACTACCAC | NC_045512.2 | 3′→5′ | 10488 | 10507 |
| 4538 | TGTTAAAACCAACACTACCA | NC_045512.2 | 3′→5′ | 10489 | 10508 |
| 4539 | ATGTTAAAACCAACACTACC | NC_045512.2 | 3′→5′ | 10490 | 10509 |
| 4540 | TAGCCTAAGAAACAATAAAC | NC_045512.2 | 3′→5′ | 11609 | 11628 |
| 4541 | ATAGCCTAAGAAACAATAAA | NC_045512.2 | 3′→5′ | 11610 | 11629 |
| 4542 | AATAGCCTAAGAAACAATAA | NC_045512.2 | 3′→5′ | 11611 | 11630 |
| 4543 | GACATTTTAGACTGTACAGT | NC_045512.2 | 3′→5′ | 11834 | 11853 |
| 4544 | TCTACAGCACCCTGCATGGA | NC_045512.2 | 3′→5′ | 12023 | 12042 |
| 4545 | GTCTACAGCACCCTGCATGG | NC_045512.2 | 3′→5′ | 12024 | 12043 |
| 4546 | TGTCTACAGCACCCTGCATG | NC_045512.2 | 3′→5′ | 12025 | 12044 |
| 4547 | ATGTCTACAGCACCCTGCAT | NC_045512.2 | 3′→5′ | 12026 | 12045 |
| 4548 | GATTTAGCCACATTCAAAGA | NC_045512.2 | 3′→5′ | 12212 | 12231 |
| 4549 | AGATTTAGCCACATTCAAAG | NC_045512.2 | 3′→5′ | 12213 | 12232 |
| 4550 | CAGATTTAGCCACATTCAAA | NC_045512.2 | 3′→5′ | 12214 | 12233 |
| 4551 | TCAGATTTAGCCACATTCAA | NC_045512.2 | 3′→5′ | 12215 | 12234 |
| 4552 | GCATTGTTGATAATGTTGTT | NC_045512.2 | 3′→5′ | 12401 | 12420 |
| 4553 | TTAGGGAATCTAGCCCATTT | NC_045512.2 | 3′→5′ | 12839 | 12858 |
| 4554 | CTTAGGGAATCTAGCCCATT | NC_045512.2 | 3′→5′ | 12840 | 12859 |
| 4555 | TCTTAGGGAATCTAGCCCAT | NC_045512.2 | 3′→5′ | 12841 | 12860 |
| 4556 | CTCTTAGGGAATCTAGCCCA | NC_045512.2 | 3′→5′ | 12842 | 12861 |
| 4557 | ACTCTTAGGGAATCTAGCCC | NC_045512.2 | 3′→5′ | 12843 | 12862 |
| 4558 | CACTCTTAGGGAATCTAGCC | NC_045512.2 | 3′→5′ | 12844 | 12863 |
| 4559 | TCACTCTTAGGGAATCTAGC | NC_045512.2 | 3′→5′ | 12845 | 12864 |
| 4560 | ATCACTCTTAGGGAATCTAG | NC_045512.2 | 3′→5′ | 12846 | 12865 |
| 4561 | CATCACTCTTAGGGAATCTA | NC_045512.2 | 3′→5′ | 12847 | 12866 |
| 4562 | CCATCACTCTTAGGGAATCT | NC_045512.2 | 3′→5′ | 12848 | 12867 |
| 4563 | ACAAGGTGGTTCCAGTTCTG | NC_045512.2 | 3′→5′ | 12885 | 12904 |
| 4564 | TACAAGGTGGTTCCAGTTCT | NC_045512.2 | 3′→5′ | 12886 | 12905 |
| 4565 | CTACAAGGTGGTTCCAGTTC | NC_045512.2 | 3′→5′ | 12887 | 12906 |
| 4566 | CCTACAAGGTGGTTCCAGTT | NC_045512.2 | 3′→5′ | 12888 | 12907 |
| 4567 | ACCTACAAGGTGGTTCCAGT | NC_045512.2 | 3′→5′ | 12889 | 12908 |
| 4568 | AACCTACAAGGTGGTTCCAG | NC_045512.2 | 3′→5′ | 12890 | 12909 |
| 4569 | AAACCTACAAGGTGGTTCCA | NC_045512.2 | 3′→5′ | 12891 | 12910 |
| 4570 | CAAACCTACAAGGTGGTTCC | NC_045512.2 | 3′→5′ | 12892 | 12911 |
| 4571 | ACAAACCTACAAGGTGGTTC | NC_045512.2 | 3′→5′ | 12893 | 12912 |
| 4572 | AACAAACCTACAAGGTGGTT | NC_045512.2 | 3′→5′ | 12894 | 12913 |
| 4573 | TAACAAACCTACAAGGTGGT | NC_045512.2 | 3′→5′ | 12895 | 12914 |
| 4574 | GTAACAAACCTACAAGGTGG | NC_045512.2 | 3′→5′ | 12896 | 12915 |
| 4575 | TGTAACAAACCTACAAGGTG | NC_045512.2 | 3′→5′ | 12897 | 12916 |
| 4576 | CTGTAACAAACCTACAAGGT | NC_045512.2 | 3′→5′ | 12898 | 12917 |
| 4577 | TCTGTAACAAACCTACAAGG | NC_045512.2 | 3′→5′ | 12899 | 12918 |
| 4578 | GTCTGTAACAAACCTACAAG | NC_045512.2 | 3′→5′ | 12900 | 12919 |
| 4579 | TGTCTGTAACAAACCTACAA | NC_045512.2 | 3′→5′ | 12901 | 12920 |
| 4580 | GTGTCTGTAACAAACCTACA | NC_045512.2 | 3′→5′ | 12902 | 12921 |
| 4581 | TGTGTCTGTAACAAACCTAC | NC_045512.2 | 3′→5′ | 12903 | 12922 |
| 4582 | GTGTGTCTGTAACAAACCTA | NC_045512.2 | 3′→5′ | 12904 | 12923 |
| 4583 | GGTGTGTCTGTAACAAACCT | NC_045512.2 | 3′→5′ | 12905 | 12924 |
| 4584 | ACCTCTATTTAGGTTGTTTA | NC_045512.2 | 3′→5′ | 12966 | 12985 |
| 4585 | TACCTCTATTTAGGTTGTTT | NC_045512.2 | 3′→5′ | 12967 | 12986 |
| 4586 | ATACCTCTATTTAGGTTGTT | NC_045512.2 | 3′→5′ | 12968 | 12987 |
| 4587 | CATACCTCTATTTAGGTTGT | NC_045512.2 | 3′→5′ | 12969 | 12988 |
| 4588 | CCATACCTCTATTTAGGTTG | NC_045512.2 | 3′→5′ | 12970 | 12989 |
| 4589 | ACCATACCTCTATTTAGGTT | NC_045512.2 | 3′→5′ | 12971 | 12990 |
| 4590 | GTGTGTGTACACAACATCTT | NC_045512.2 | 3′→5′ | 13151 | 13170 |
| 4591 | AGTGTGTGTACACAACATCT | NC_045512.2 | 3′→5′ | 13152 | 13171 |
| 4592 | CAGTGTGTGTACACAACATC | NC_045512.2 | 3′→5′ | 13153 | 13172 |
| 4593 | CCAGTGTGTGTACACAACAT | NC_045512.2 | 3′→5′ | 13154 | 13173 |
| 4594 | ACCAGTGTGTGTACACAACA | NC_045512.2 | 3′→5′ | 13155 | 13174 |
| 4595 | TACCAGTGTGTGTACACAAC | NC_045512.2 | 3′→5′ | 13156 | 13175 |
| 4596 | GTACCAGTGTGTGTACACAA | NC_045512.2 | 3′→5′ | 13157 | 13176 |
| 4597 | AGACGGTACAGACTGTGTTT | NC_045512.2 | 3′→5′ | 13363 | 13382 |
| 4598 | CAGACGGTACAGACTGTGTT | NC_045512.2 | 3′→5′ | 13364 | 13383 |
| 4599 | GCAGACGGTACAGACTGTGT | NC_045512.2 | 3′→5′ | 13365 | 13384 |
| 4600 | CGCAGACGGTACAGACTGTG | NC_045512.2 | 3′→5′ | 13366 | 13385 |
| 4601 | CCGCAGACGGTACAGACTGT | NC_045512.2 | 3′→5′ | 13367 | 13386 |
| 4602 | CAGCCATAACCTTTCCACAT | NC_045512.2 | 3′→5′ | 13388 | 13407 |
| 4603 | ACAGCCATAACCTTTCCACA | NC_045512.2 | 3′→5′ | 13389 | 13408 |
| 4604 | TACAGCCATAACCTTTCCAC | NC_045512.2 | 3′→5′ | 13390 | 13409 |
| 4605 | CTACAGCCATAACCTTTCCA | NC_045512.2 | 3′→5′ | 13391 | 13410 |
| 4606 | ACTACAGCCATAACCTTTCC | NC_045512.2 | 3′→5′ | 13392 | 13411 |
| 4607 | AACTACAGCCATAACCTTTC | NC_045512.2 | 3′→5′ | 13393 | 13412 |
| 4608 | CAACTACAGCCATAACCTTT | NC_045512.2 | 3′→5′ | 13394 | 13413 |
| 4609 | ACAACTACAGCCATAACCTT | NC_045512.2 | 3′→5′ | 13395 | 13414 |
| 4610 | CACAACTACAGCCATAACCT | NC_045512.2 | 3′→5′ | 13396 | 13415 |
| 4611 | TCACAACTACAGCCATAACC | NC_045512.2 | 3′→5′ | 13397 | 13416 |
| 4612 | CGCAAACCCGTTTAAAAACG | NC_045512.2 | 3′→5′ | 13458 | 13477 |
| 4613 | CCGCAAACCCGTTTAAAAAC | NC_045512.2 | 3′→5′ | 13459 | 13478 |
| 4614 | ACCGCAAACCCGTTTAAAAA | NC_045512.2 | 3′→5′ | 13460 | 13479 |
| 4615 | CACCGCAAACCCGTTTAAAA | NC_045512.2 | 3′→5′ | 13461 | 13480 |
| 4616 | ACACCGCAAACCCGTTTAAA | NC_045512.2 | 3′→5′ | 13462 | 13481 |
| 4617 | TACACCGCAAACCCGTTTAA | NC_045512.2 | 3′→5′ | 13463 | 13482 |
| 4618 | TTACACCGCAAACCCGTTTA | NC_045512.2 | 3′→5′ | 13464 | 13483 |
| 4619 | CTTACACCGCAAACCCGTTT | NC_045512.2 | 3′→5′ | 13465 | 13484 |
| 4620 | ACTTACACCGCAAACCCGTT | NC_045512.2 | 3′→5′ | 13466 | 13485 |
| 4621 | CACTTACACCGCAAACCCGT | NC_045512.2 | 3′→5′ | 13467 | 13486 |
| 4622 | GCACTTACACCGCAAACCCG | NC_045512.2 | 3′→5′ | 13468 | 13487 |
| 4623 | TGCACTTACACCGCAAACCC | NC_045512.2 | 3′→5′ | 13469 | 13488 |
| 4624 | CTGCACTTACACCGCAAACC | NC_045512.2 | 3′→5′ | 13470 | 13489 |
| 4625 | GCTGCACTTACACCGCAAAC | NC_045512.2 | 3′→5′ | 13471 | 13490 |
| 4626 | GGCTGCACTTACACCGCAAA | NC_045512.2 | 3′→5′ | 13472 | 13491 |
| 4627 | GGGCTGCACTTACACCGCAA | NC_045512.2 | 3′→5′ | 13473 | 13492 |
| 4628 | CGGGCTGCACTTACACCGCA | NC_045512.2 | 3′→5′ | 13474 | 13493 |
| 4629 | ACGGGCTGCACTTACACCGC | NC_045512.2 | 3′→5′ | 13475 | 13494 |
| 4630 | GACGGGCTGCACTTACACCG | NC_045512.2 | 3′→5′ | 13476 | 13495 |
| 4631 | AGACGGGCTGCACTTACACC | NC_045512.2 | 3′→5′ | 13477 | 13496 |
| 4632 | AAGACGGGCTGCACTTACAC | NC_045512.2 | 3′→5′ | 13478 | 13497 |
| 4633 | TAAGACGGGCTGCACTTACA | NC_045512.2 | 3′→5′ | 13479 | 13498 |
| 4634 | GTAAGACGGGCTGCACTTAC | NC_045512.2 | 3′→5′ | 13480 | 13499 |
| 4635 | TGTAAGACGGGCTGCACTTA | NC_045512.2 | 3′→5′ | 13481 | 13500 |
| 4636 | GTGTAAGACGGGCTGCACTT | NC_045512.2 | 3′→5′ | 13482 | 13501 |
| 4637 | GGTGTAAGACGGGCTGCACT | NC_045512.2 | 3′→5′ | 13483 | 13502 |
| 4638 | CGGTGTAAGACGGGCTGCAC | NC_045512.2 | 3′→5′ | 13484 | 13503 |
| 4639 | ACGGTGTAAGACGGGCTGCA | NC_045512.2 | 3′→5′ | 13485 | 13504 |
| 4640 | CACGGTGTAAGACGGGCTGC | NC_045512.2 | 3′→5′ | 13486 | 13505 |
| 4641 | GCACGGTGTAAGACGGGCTG | NC_045512.2 | 3′→5′ | 13487 | 13506 |
| 4642 | CGCACGGTGTAAGACGGGCT | NC_045512.2 | 3′→5′ | 13488 | 13507 |
| 4643 | CCGCACGGTGTAAGACGGGC | NC_045512.2 | 3′→5′ | 13489 | 13508 |
| 4644 | GCCGCACGGTGTAAGACGGG | NC_045512.2 | 3′→5′ | 13490 | 13509 |
| 4645 | TGCCGCACGGTGTAAGACGG | NC_045512.2 | 3′→5′ | 13491 | 13510 |
| 4646 | GTGCCGCACGGTGTAAGACG | NC_045512.2 | 3′→5′ | 13492 | 13511 |
| 4647 | TGTGCCGCACGGTGTAAGAC | NC_045512.2 | 3′→5′ | 13493 | 13512 |
| 4648 | CTGTGCCGCACGGTGTAAGA | NC_045512.2 | 3′→5′ | 13494 | 13513 |
| 4649 | CCTGTGCCGCACGGTGTAAG | NC_045512.2 | 3′→5′ | 13495 | 13514 |
| 4650 | GCCTGTGCCGCACGGTGTAA | NC_045512.2 | 3′→5′ | 13496 | 13515 |
| 4651 | TGCCTGTGCCGCACGGTGTA | NC_045512.2 | 3′→5′ | 13497 | 13516 |
| 4652 | GTGCCTGTGCCGCACGGTGT | NC_045512.2 | 3′→5′ | 13498 | 13517 |
| 4653 | AGTGCCTGTGCCGCACGGTG | NC_045512.2 | 3′→5′ | 13499 | 13518 |
| 4654 | TAGTGCCTGTGCCGCACGGT | NC_045512.2 | 3′→5′ | 13500 | 13519 |
| 4655 | CTAGTGCCTGTGCCGCACGG | NC_045512.2 | 3′→5′ | 13501 | 13520 |
| 4656 | ATATGTGGTACCATGTCACC | NC_045512.2 | 3′→5′ | 13762 | 13781 |
| 4657 | TATATGTGGTACCATGTCAC | NC_045512.2 | 3′→5′ | 13763 | 13782 |
| 4658 | ATATATGTGGTACCATGTCA | NC_045512.2 | 3′→5′ | 13764 | 13783 |
| 4659 | GATATATGTGGTACCATGTC | NC_045512.2 | 3′→5′ | 13765 | 13784 |
| 4660 | TGATATATGTGGTACCATGT | NC_045512.2 | 3′→5′ | 13766 | 13785 |
| 4661 | GTGATATATGTGGTACCATG | NC_045512.2 | 3′→5′ | 13767 | 13786 |
| 4662 | CGTGATATATGTGGTACCAT | NC_045512.2 | 3′→5′ | 13768 | 13787 |
| 4663 | ACGTGATATATGTGGTACCA | NC_045512.2 | 3′→5′ | 13769 | 13788 |
| 4664 | GACGTGATATATGTGGTACC | NC_045512.2 | 3′→5′ | 13770 | 13789 |
| 4665 | TGACGTGATATATGTGGTAC | NC_045512.2 | 3′→5′ | 13771 | 13790 |
| 4666 | CAATATTTAAAATAACGGTC | NC_045512.2 | 3′→5′ | 14290 | 14309 |
| 4667 | CCAATATTTAAAATAACGGT | NC_045512.2 | 3′→5′ | 14291 | 14310 |
| 4668 | CCCAATATTTAAAATAACGG | NC_045512.2 | 3′→5′ | 14292 | 14311 |
| 4669 | TCCCAATATTTAAAATAACG | NC_045512.2 | 3′→5′ | 14293 | 14312 |
| 4670 | GGTCCAAAACTTGTAGGTGG | NC_045512.2 | 3′→5′ | 14404 | 14423 |
| 4671 | TGGTCCAAAACTTGTAGGTG | NC_045512.2 | 3′→5′ | 14405 | 14424 |
| 4672 | GTGGTCCAAAACTTGTAGGT | NC_045512.2 | 3′→5′ | 14406 | 14425 |
| 4673 | AGTGGTCCAAAACTTGTAGG | NC_045512.2 | 3′→5′ | 14407 | 14426 |
| 4674 | TAGTGGTCCAAAACTTGTAG | NC_045512.2 | 3′→5′ | 14408 | 14427 |
| 4675 | CTAGTGGTCCAAAACTTGTA | NC_045512.2 | 3′→5′ | 14409 | 14428 |
| 4676 | ACTAGTGGTCCAAAACTTGT | NC_045512.2 | 3′→5′ | 14410 | 14429 |
| 4677 | TTTACATCCTGATTATGTAC | NC_045512.2 | 3′→5′ | 14500 | 14519 |
| 4678 | GTTTACATCCTGATTATGTA | NC_045512.2 | 3′→5′ | 14501 | 14520 |
| 4679 | AGTTTACATCCTGATTATGT | NC_045512.2 | 3′→5′ | 14502 | 14521 |
| 4680 | AAGTTTACATCCTGATTATG | NC_045512.2 | 3′→5′ | 14503 | 14522 |
| 4681 | TAAGTTTACATCCTGATTAT | NC_045512.2 | 3′→5′ | 14504 | 14523 |
| 4682 | GTAAGTTTACATCCTGATTA | NC_045512.2 | 3′→5′ | 14505 | 14524 |
| 4683 | TGTAAGTTTACATCCTGATT | NC_045512.2 | 3′→5′ | 14506 | 14525 |
| 4684 | ATGTAAGTTTACATCCTGAT | NC_045512.2 | 3′→5′ | 14507 | 14526 |
| 4685 | TATGTAAGTTTACATCCTGA | NC_045512.2 | 3′→5′ | 14508 | 14527 |
| 4686 | CTATGTAAGTTTACATCCTG | NC_045512.2 | 3′→5′ | 14509 | 14528 |
| 4687 | GCTATGTAAGTTTACATCCT | NC_045512.2 | 3′→5′ | 14510 | 14529 |
| 4688 | AGCTATGTAAGTTTACATCC | NC_045512.2 | 3′→5′ | 14511 | 14530 |
| 4689 | GAGCTATGTAAGTTTACATC | NC_045512.2 | 3′→5′ | 14512 | 14531 |
| 4690 | AGTGCAGCTACTGAAAAGCA | NC_045512.2 | 3′→5′ | 14623 | 14642 |
| 4691 | ACAGTTTGAAAAGCAACATT | NC_045512.2 | 3′→5′ | 14650 | 14669 |
| 4692 | GACAGTTTGAAAAGCAACAT | NC_045512.2 | 3′→5′ | 14651 | 14670 |
| 4693 | TGACAGTTTGAAAAGCAACA | NC_045512.2 | 3′→5′ | 14652 | 14671 |
| 4694 | TTGACAGTTTGAAAAGCAAC | NC_045512.2 | 3′→5′ | 14653 | 14672 |
| 4695 | TTTGACAGTTTGAAAAGCAA | NC_045512.2 | 3′→5′ | 14654 | 14673 |
| 4696 | GTTTGACAGTTTGAAAAGCA | NC_045512.2 | 3′→5′ | 14655 | 14674 |
| 4697 | GGTTTGACAGTTTGAAAAGC | NC_045512.2 | 3′→5′ | 14656 | 14675 |
| 4698 | GGGTTTGACAGTTTGAAAAG | NC_045512.2 | 3′→5′ | 14657 | 14676 |
| 4699 | CGGGTTTGACAGTTTGAAAA | NC_045512.2 | 3′→5′ | 14658 | 14677 |
| 4700 | CCGGGTTTGACAGTTTGAAA | NC_045512.2 | 3′→5′ | 14659 | 14678 |
| 4701 | ACCGGGTTTGACAGTTTGAA | NC_045512.2 | 3′→5′ | 14660 | 14679 |
| 4702 | TACCGGGTTTGACAGTTTGA | NC_045512.2 | 3′→5′ | 14661 | 14680 |
| 4703 | TTACCGGGTTTGACAGTTTG | NC_045512.2 | 3′→5′ | 14662 | 14681 |
| 4704 | ATTACCGGGTTTGACAGTTT | NC_045512.2 | 3′→5′ | 14663 | 14682 |
| 4705 | AATTACCGGGTTTGACAGTT | NC_045512.2 | 3′→5′ | 14664 | 14683 |
| 4706 | AAATTACCGGGTTTGACAGT | NC_045512.2 | 3′→5′ | 14665 | 14684 |
| 4707 | AAAATTACCGGGTTTGACAG | NC_045512.2 | 3′→5′ | 14666 | 14685 |
| 4708 | TAAAATTACCGGGTTTGACA | NC_045512.2 | 3′→5′ | 14667 | 14686 |
| 4709 | TTAAAATTACCGGGTTTGAC | NC_045512.2 | 3′→5′ | 14668 | 14687 |
| 4710 | TTAGACACAGCAAAGTCATA | NC_045512.2 | 3′→5′ | 14698 | 14717 |
| 4711 | GAACTTCCTTCCTTAAAGAA | NC_045512.2 | 3′→5′ | 14722 | 14741 |
| 4712 | AGAACTTCCTTCCTTAAAGA | NC_045512.2 | 3′→5′ | 14723 | 14742 |
| 4713 | CAGAACTTCCTTCCTTAAAG | NC_045512.2 | 3′→5′ | 14724 | 14743 |
| 4714 | ACAGAACTTCCTTCCTTAAA | NC_045512.2 | 3′→5′ | 14725 | 14744 |
| 4715 | AACAGAACTTCCTTCCTTAA | NC_045512.2 | 3′→5′ | 14726 | 14745 |
| 4716 | CAACAGAACTTCCTTCCTTA | NC_045512.2 | 3′→5′ | 14727 | 14746 |
| 4717 | TCAACAGAACTTCCTTCCTT | NC_045512.2 | 3′→5′ | 14728 | 14747 |
| 4718 | TTCAACAGAACTTCCTTCCT | NC_045512.2 | 3′→5′ | 14729 | 14748 |
| 4719 | AGCAAAGAAGAAGTGTTTTA | NC_045512.2 | 3′→5′ | 14750 | 14769 |
| 4720 | GAGCAAAGAAGAAGTGTTTT | NC_045512.2 | 3′→5′ | 14751 | 14770 |
| 4721 | TGAGCAAAGAAGAAGTGTTT | NC_045512.2 | 3′→5′ | 14752 | 14771 |
| 4722 | CTGAGCAAAGAAGAAGTGTT | NC_045512.2 | 3′→5′ | 14753 | 14772 |
| 4723 | CCTGAGCAAAGAAGAAGTGT | NC_045512.2 | 3′→5′ | 14754 | 14773 |
| 4724 | TCCTGAGCAAAGAAGAAGTG | NC_045512.2 | 3′→5′ | 14755 | 14774 |
| 4725 | ATCCTGAGCAAAGAAGAAGT | NC_045512.2 | 3′→5′ | 14756 | 14775 |
| 4726 | CATCCTGAGCAAAGAAGAAG | NC_045512.2 | 3′→5′ | 14757 | 14776 |
| 4727 | CCATCCTGAGCAAAGAAGAA | NC_045512.2 | 3′→5′ | 14758 | 14777 |
| 4728 | CTGATATCACACATTGTTGG | NC_045512.2 | 3′→5′ | 14821 | 14840 |
| 4729 | TCTGATATCACACATTGTTG | NC_045512.2 | 3′→5′ | 14822 | 14841 |
| 4730 | GTCTGATATCACACATTGTT | NC_045512.2 | 3′→5′ | 14823 | 14842 |
| 4731 | TGTCTGATATCACACATTGT | NC_045512.2 | 3′→5′ | 14824 | 14843 |
| 4732 | TTGTCTGATATCACACATTG | NC_045512.2 | 3′→5′ | 14825 | 14844 |
| 4733 | GTTGTCTGATATCACACATT | NC_045512.2 | 3′→5′ | 14826 | 14845 |
| 4734 | AGTTGTCTGATATCACACAT | NC_045512.2 | 3′→5′ | 14827 | 14846 |
| 4735 | TTATCAACAACTTCAACTAC | NC_045512.2 | 3′→5′ | 14854 | 14873 |
| 4736 | CCATCGTAACAATCAAAGTA | NC_045512.2 | 3′→5′ | 14875 | 14894 |
| 4737 | ACCATCGTAACAATCAAAGT | NC_045512.2 | 3′→5′ | 14876 | 14895 |
| 4738 | CACCATCGTAACAATCAAAG | NC_045512.2 | 3′→5′ | 14877 | 14896 |
| 4739 | CCACCATCGTAACAATCAAA | NC_045512.2 | 3′→5′ | 14878 | 14897 |
| 4740 | GCCACCATCGTAACAATCAA | NC_045512.2 | 3′→5′ | 14879 | 14898 |
| 4741 | AGCCACCATCGTAACAATCA | NC_045512.2 | 3′→5′ | 14880 | 14899 |
| 4742 | CAGCCACCATCGTAACAATC | NC_045512.2 | 3′→5′ | 14881 | 14900 |
| 4743 | ACAGCCACCATCGTAACAAT | NC_045512.2 | 3′→5′ | 14882 | 14901 |
| 4744 | TACAGCCACCATCGTAACAA | NC_045512.2 | 3′→5′ | 14883 | 14902 |
| 4745 | ATACAGCCACCATCGTAACA | NC_045512.2 | 3′→5′ | 14884 | 14903 |
| 4746 | AGTCTAGCCTTACCCCATTT | NC_045512.2 | 3′→5′ | 14962 | 14981 |
| 4747 | AAGTCTAGCCTTACCCCATT | NC_045512.2 | 3′→5′ | 14963 | 14982 |
| 4748 | AAAGTCTAGCCTTACCCCAT | NC_045512.2 | 3′→5′ | 14964 | 14983 |
| 4749 | TAAAGTCTAGCCTTACCCCA | NC_045512.2 | 3′→5′ | 14965 | 14984 |
| 4750 | ATAAAGTCTAGCCTTACCCC | NC_045512.2 | 3′→5′ | 14966 | 14985 |
| 4751 | AATAAAGTCTAGCCTTACCC | NC_045512.2 | 3′→5′ | 14967 | 14986 |
| 4752 | TAATAAAGTCTAGCCTTACC | NC_045512.2 | 3′→5′ | 14968 | 14987 |
| 4753 | ATAATAAAGTCTAGCCTTAC | NC_045512.2 | 3′→5′ | 14969 | 14988 |
| 4754 | CATAATAAAGTCTAGCCTTA | NC_045512.2 | 3′→5′ | 14970 | 14989 |
| 4755 | TCATAATAAAGTCTAGCCTT | NC_045512.2 | 3′→5′ | 14971 | 14990 |
| 4756 | TGATCCTCATAACTCATTGA | NC_045512.2 | 3′→5′ | 14992 | 15011 |
| 4757 | TTGATCCTCATAACTCATTG | NC_045512.2 | 3′→5′ | 14993 | 15012 |
| 4758 | CTTGATCCTCATAACTCATT | NC_045512.2 | 3′→5′ | 14994 | 15013 |
| 4759 | TCTTGATCCTCATAACTCAT | NC_045512.2 | 3′→5′ | 14995 | 15014 |
| 4760 | ATCTTGATCCTCATAACTCA | NC_045512.2 | 3′→5′ | 14996 | 15015 |
| 4761 | CATCTTGATCCTCATAACTC | NC_045512.2 | 3′→5′ | 14997 | 15016 |
| 4762 | GCATCTTGATCCTCATAACT | NC_045512.2 | 3′→5′ | 14998 | 15017 |
| 4763 | TGCATCTTGATCCTCATAAC | NC_045512.2 | 3′→5′ | 14999 | 15018 |
| 4764 | GTGCATCTTGATCCTCATAA | NC_045512.2 | 3′→5′ | 15000 | 15019 |
| 4765 | AGTGCATCTTGATCCTCATA | NC_045512.2 | 3′→5′ | 15001 | 15020 |
| 4766 | TTAAGATTCATTTGAGTTAT | NC_045512.2 | 3′→5′ | 15055 | 15074 |
| 4767 | CTTAAGATTCATTTGAGTTA | NC_045512.2 | 3′→5′ | 15056 | 15075 |
| 4768 | ACTTAAGATTCATTTGAGTT | NC_045512.2 | 3′→5′ | 15057 | 15076 |
| 4769 | TACTTAAGATTCATTTGAGT | NC_045512.2 | 3′→5′ | 15058 | 15077 |
| 4770 | ATACTTAAGATTCATTTGAG | NC_045512.2 | 3′→5′ | 15059 | 15078 |
| 4771 | CATACTTAAGATTCATTTGA | NC_045512.2 | 3′→5′ | 15060 | 15079 |
| 4772 | GCATACTTAAGATTCATTTG | NC_045512.2 | 3′→5′ | 15061 | 15080 |
| 4773 | GGCATACTTAAGATTCATTT | NC_045512.2 | 3′→5′ | 15062 | 15081 |
| 4774 | TGGCATACTTAAGATTCATT | NC_045512.2 | 3′→5′ | 15063 | 15082 |
| 4775 | ATGGCATACTTAAGATTCAT | NC_045512.2 | 3′→5′ | 15064 | 15083 |
| 4776 | AATGGCATACTTAAGATTCA | NC_045512.2 | 3′→5′ | 15065 | 15084 |
| 4777 | TAATGGCATACTTAAGATTC | NC_045512.2 | 3′→5′ | 15066 | 15085 |
| 4778 | CTAATGGCATACTTAAGATT | NC_045512.2 | 3′→5′ | 15067 | 15086 |
| 4779 | ACTAATGGCATACTTAAGAT | NC_045512.2 | 3′→5′ | 15068 | 15087 |
| 4780 | CACTAATGGCATACTTAAGA | NC_045512.2 | 3′→5′ | 15069 | 15088 |
| 4781 | GCACTAATGGCATACTTAAG | NC_045512.2 | 3′→5′ | 15070 | 15089 |
| 4782 | TGCACTAATGGCATACTTAA | NC_045512.2 | 3′→5′ | 15071 | 15090 |
| 4783 | TTGCACTAATGGCATACTTA | NC_045512.2 | 3′→5′ | 15072 | 15091 |
| 4784 | TTTGCACTAATGGCATACTT | NC_045512.2 | 3′→5′ | 15073 | 15092 |
| 4785 | CTTTGCACTAATGGCATACT | NC_045512.2 | 3′→5′ | 15074 | 15093 |
| 4786 | TCTTTGCACTAATGGCATAC | NC_045512.2 | 3′→5′ | 15075 | 15094 |
| 4787 | TTCTTTGCACTAATGGCATA | NC_045512.2 | 3′→5′ | 15076 | 15095 |
| 4788 | ATTCTTTGCACTAATGGCAT | NC_045512.2 | 3′→5′ | 15077 | 15096 |
| 4789 | TATTCTTTGCACTAATGGCA | NC_045512.2 | 3′→5′ | 15078 | 15097 |
| 4790 | CTATTCTTTGCACTAATGGC | NC_045512.2 | 3′→5′ | 15079 | 15098 |
| 4791 | TCTATTCTTTGCACTAATGG | NC_045512.2 | 3′→5′ | 15080 | 15099 |
| 4792 | CTCTATTCTTTGCACTAATG | NC_045512.2 | 3′→5′ | 15081 | 15100 |
| 4793 | GCTCTATTCTTTGCACTAAT | NC_045512.2 | 3′→5′ | 15082 | 15101 |
| 4794 | AGCTCTATTCTTTGCACTAA | NC_045512.2 | 3′→5′ | 15083 | 15102 |
| 4795 | GAGCTCTATTCTTTGCACTA | NC_045512.2 | 3′→5′ | 15084 | 15103 |
| 4796 | CGAGCTCTATTCTTTGCACT | NC_045512.2 | 3′→5′ | 15085 | 15104 |
| 4797 | GCGAGCTCTATTCTTTGCAC | NC_045512.2 | 3′→5′ | 15086 | 15105 |
| 4798 | TGCGAGCTCTATTCTTTGCA | NC_045512.2 | 3′→5′ | 15087 | 15106 |
| 4799 | GTGCGAGCTCTATTCTTTGC | NC_045512.2 | 3′→5′ | 15088 | 15107 |
| 4800 | GGTGCGAGCTCTATTCTTTG | NC_045512.2 | 3′→5′ | 15089 | 15108 |
| 4801 | CGGTGCGAGCTCTATTCTTT | NC_045512.2 | 3′→5′ | 15090 | 15109 |
| 4802 | ACGGTGCGAGCTCTATTCTT | NC_045512.2 | 3′→5′ | 15091 | 15110 |
| 4803 | TACGGTGCGAGCTCTATTCT | NC_045512.2 | 3′→5′ | 15092 | 15111 |
| 4804 | CTACGGTGCGAGCTCTATTC | NC_045512.2 | 3′→5′ | 15093 | 15112 |
| 4805 | GCTACGGTGCGAGCTCTATT | NC_045512.2 | 3′→5′ | 15094 | 15113 |
| 4806 | AGCTACGGTGCGAGCTCTAT | NC_045512.2 | 3′→5′ | 15095 | 15114 |
| 4807 | CAGCTACGGTGCGAGCTCTA | NC_045512.2 | 3′→5′ | 15096 | 15115 |
| 4808 | CCAGCTACGGTGCGAGCTCT | NC_045512.2 | 3′→5′ | 15097 | 15116 |
| 4809 | ACCAGCTACGGTGCGAGCTC | NC_045512.2 | 3′→5′ | 15098 | 15117 |
| 4810 | CACCAGCTACGGTGCGAGCT | NC_045512.2 | 3′→5′ | 15099 | 15118 |
| 4811 | ACACCAGCTACGGTGCGAGC | NC_045512.2 | 3′→5′ | 15100 | 15119 |
| 4812 | GACACCAGCTACGGTGCGAG | NC_045512.2 | 3′→5′ | 15101 | 15120 |
| 4813 | AGACACCAGCTACGGTGCGA | NC_045512.2 | 3′→5′ | 15102 | 15121 |
| 4814 | GAGACACCAGCTACGGTGCG | NC_045512.2 | 3′→5′ | 15103 | 15122 |
| 4815 | AGAGACACCAGCTACGGTGC | NC_045512.2 | 3′→5′ | 15104 | 15123 |
| 4816 | TAGAGACACCAGCTACGGTG | NC_045512.2 | 3′→5′ | 15105 | 15124 |
| 4817 | ATAGAGACACCAGCTACGGT | NC_045512.2 | 3′→5′ | 15106 | 15125 |
| 4818 | GATAGAGACACCAGCTACGG | NC_045512.2 | 3′→5′ | 15107 | 15126 |
| 4819 | AGATAGAGACACCAGCTACG | NC_045512.2 | 3′→5′ | 15108 | 15127 |
| 4820 | CAGATAGAGACACCAGCTAC | NC_045512.2 | 3′→5′ | 15109 | 15128 |
| 4821 | ACAGATAGAGACACCAGCTA | NC_045512.2 | 3′→5′ | 15110 | 15129 |
| 4822 | TACAGATAGAGACACCAGCT | NC_045512.2 | 3′→5′ | 15111 | 15130 |
| 4823 | CTACAGATAGAGACACCAGC | NC_045512.2 | 3′→5′ | 15112 | 15131 |
| 4824 | ACTACAGATAGAGACACCAG | NC_045512.2 | 3′→5′ | 15113 | 15132 |
| 4825 | TACTACAGATAGAGACACCA | NC_045512.2 | 3′→5′ | 15114 | 15133 |
| 4826 | GTACTACAGATAGAGACACC | NC_045512.2 | 3′→5′ | 15115 | 15134 |
| 4827 | AGTACTACAGATAGAGACAC | NC_045512.2 | 3′→5′ | 15116 | 15135 |
| 4828 | TAGTACTACAGATAGAGACA | NC_045512.2 | 3′→5′ | 15117 | 15136 |
| 4829 | ATAGTACTACAGATAGAGAC | NC_045512.2 | 3′→5′ | 15118 | 15137 |
| 4830 | CATAGTACTACAGATAGAGA | NC_045512.2 | 3′→5′ | 15119 | 15138 |
| 4831 | TCATAGTACTACAGATAGAG | NC_045512.2 | 3′→5′ | 15120 | 15139 |
| 4832 | GTCATAGTACTACAGATAGA | NC_045512.2 | 3′→5′ | 15121 | 15140 |
| 4833 | CCTCTAGTGGCGGCTATTGA | NC_045512.2 | 3′→5′ | 15172 | 15191 |
| 4834 | TCCTCTAGTGGCGGCTATTG | NC_045512.2 | 3′→5′ | 15173 | 15192 |
| 4835 | CTCCTCTAGTGGCGGCTATT | NC_045512.2 | 3′→5′ | 15174 | 15193 |
| 4836 | GCTCCTCTAGTGGCGGCTAT | NC_045512.2 | 3′→5′ | 15175 | 15194 |
| 4837 | AGCTCCTCTAGTGGCGGCTA | NC_045512.2 | 3′→5′ | 15176 | 15195 |
| 4838 | TAGCTCCTCTAGTGGCGGCT | NC_045512.2 | 3′→5′ | 15177 | 15196 |
| 4839 | GTAGCTCCTCTAGTGGCGGC | NC_045512.2 | 3′→5′ | 15178 | 15197 |
| 4840 | AGTAGCTCCTCTAGTGGCGG | NC_045512.2 | 3′→5′ | 15179 | 15198 |
| 4841 | CAGTAGCTCCTCTAGTGGCG | NC_045512.2 | 3′→5′ | 15180 | 15199 |
| 4842 | ACAGTAGCTCCTCTAGTGGC | NC_045512.2 | 3′→5′ | 15181 | 15200 |
| 4843 | AGCATGTTAGGCATGGCTCT | NC_045512.2 | 3′→5′ | 15310 | 15329 |
| 4844 | AAGCATGTTAGGCATGGCTC | NC_045512.2 | 3′→5′ | 15311 | 15330 |
| 4845 | TAAGCATGTTAGGCATGGCT | NC_045512.2 | 3′→5′ | 15312 | 15331 |
| 4846 | CTAAGCATGTTAGGCATGGC | NC_045512.2 | 3′→5′ | 15313 | 15332 |
| 4847 | TGTTTGCGAGCAAGAACAAG | NC_045512.2 | 3′→5′ | 15346 | 15365 |
| 4848 | ATGTTTGCGAGCAAGAACAA | NC_045512.2 | 3′→5′ | 15347 | 15366 |
| 4849 | TATGTTTGCGAGCAAGAACA | NC_045512.2 | 3′→5′ | 15348 | 15367 |
| 4850 | CTATTAGCATAAGCAGTTGT | NC_045512.2 | 3′→5′ | 15496 | 15515 |
| 4851 | ACTATTAGCATAAGCAGTTG | NC_045512.2 | 3′→5′ | 15497 | 15516 |
| 4852 | CACTATTAGCATAAGCAGTT | NC_045512.2 | 3′→5′ | 15498 | 15517 |
| 4853 | ACACTATTAGCATAAGCAGT | NC_045512.2 | 3′→5′ | 15499 | 15518 |
| 4854 | TTTCTATAGAGACACTCATA | NC_045512.2 | 3′→5′ | 15622 | 15641 |
| 4855 | ATTTCTATAGAGACACTCAT | NC_045512.2 | 3′→5′ | 15623 | 15642 |
| 4856 | TATTTCTATAGAGACACTCA | NC_045512.2 | 3′→5′ | 15624 | 15643 |
| 4857 | CTATTTCTATAGAGACACTC | NC_045512.2 | 3′→5′ | 15625 | 15644 |
| 4858 | GTAAGGTCAGTCTCAGTCCA | NC_045512.2 | 3′→5′ | 15838 | 15857 |
| 4859 | AGTAAGGTCAGTCTCAGTCC | NC_045512.2 | 3′→5′ | 15839 | 15858 |
| 4860 | TAGTAAGGTCAGTCTCAGTC | NC_045512.2 | 3′→5′ | 15840 | 15859 |
| 4861 | TTAGTAAGGTCAGTCTCAGT | NC_045512.2 | 3′→5′ | 15841 | 15860 |
| 4862 | TTTAGTAAGGTCAGTCTCAG | NC_045512.2 | 3′→5′ | 15842 | 15861 |
| 4863 | CTTTAGTAAGGTCAGTCTCA | NC_045512.2 | 3′→5′ | 15843 | 15862 |
| 4864 | CCTTTAGTAAGGTCAGTCTC | NC_045512.2 | 3′→5′ | 15844 | 15863 |
| 4865 | TCCTTTAGTAAGGTCAGTCT | NC_045512.2 | 3′→5′ | 15845 | 15864 |
| 4866 | GTCCTTTAGTAAGGTCAGTC | NC_045512.2 | 3′→5′ | 15846 | 15865 |
| 4867 | GGTCCTTTAGTAAGGTCAGT | NC_045512.2 | 3′→5′ | 15847 | 15866 |
| 4868 | AGGTCCTTTAGTAAGGTCAG | NC_045512.2 | 3′→5′ | 15848 | 15867 |
| 4869 | GAGGTCCTTTAGTAAGGTCA | NC_045512.2 | 3′→5′ | 15849 | 15868 |
| 4870 | TGAGGTCCTTTAGTAAGGTC | NC_045512.2 | 3′→5′ | 15850 | 15869 |
| 4871 | TGTTTAACTAGCATTGTATG | NC_045512.2 | 3′→5′ | 15886 | 15905 |
| 4872 | ATAAGTGTACCATCTGTTTT | NC_045512.2 | 3′→5′ | 15985 | 16004 |
| 4873 | CATAAGTGTACCATCTGTTT | NC_045512.2 | 3′→5′ | 15986 | 16005 |
| 4874 | TCATAAGTGTACCATCTGTT | NC_045512.2 | 3′→5′ | 15987 | 16006 |
| 4875 | ATCATAAGTGTACCATCTGT | NC_045512.2 | 3′→5′ | 15988 | 16007 |
| 4876 | AATCATAAGTGTACCATCTG | NC_045512.2 | 3′→5′ | 15989 | 16008 |
| 4877 | CAATCATAAGTGTACCATCT | NC_045512.2 | 3′→5′ | 15990 | 16009 |
| 4878 | TCAATCATAAGTGTACCATC | NC_045512.2 | 3′→5′ | 15991 | 16010 |
| 4879 | TCAGCATACTCCTGATTAGG | NC_045512.2 | 3′→5′ | 16057 | 16076 |
| 4880 | ATCAGCATACTCCTGATTAG | NC_045512.2 | 3′→5′ | 16058 | 16077 |
| 4881 | CATCAGCATACTCCTGATTA | NC_045512.2 | 3′→5′ | 16059 | 16078 |
| 4882 | ACATCAGCATACTCCTGATT | NC_045512.2 | 3′→5′ | 16060 | 16079 |
| 4883 | TCATAAAACTCAGGTTCCCA | NC_045512.2 | 3′→5′ | 16186 | 16205 |
| 4884 | TTTTCAAAGGTGTACTCTCC | NC_045512.2 | 3′→5′ | 16822 | 16841 |
| 4885 | TTTTTCAAAGGTGTACTCTC | NC_045512.2 | 3′→5′ | 16823 | 16842 |
| 4886 | CTTTTTCAAAGGTGTACTCT | NC_045512.2 | 3′→5′ | 16824 | 16843 |
| 4887 | CCTTTTTCAAAGGTGTACTC | NC_045512.2 | 3′→5′ | 16825 | 16844 |
| 4888 | ACCTTTTTCAAAGGTGTACT | NC_045512.2 | 3′→5′ | 16826 | 16845 |
| 4889 | CACCTTTTTCAAAGGTGTAC | NC_045512.2 | 3′→5′ | 16827 | 16846 |
| 4890 | TCACCTTTTTCAAAGGTGTA | NC_045512.2 | 3′→5′ | 16828 | 16847 |
| 4891 | GTCACCTTTTTCAAAGGTGT | NC_045512.2 | 3′→5′ | 16829 | 16848 |
| 4892 | AGTCACCTTTTTCAAAGGTG | NC_045512.2 | 3′→5′ | 16830 | 16849 |
| 4893 | TAGTCACCTTTTTCAAAGGT | NC_045512.2 | 3′→5′ | 16831 | 16850 |
| 4894 | ATAGTCACCTTTTTCAAAGG | NC_045512.2 | 3′→5′ | 16832 | 16851 |
| 4895 | CATAGTCACCTTTTTCAAAG | NC_045512.2 | 3′→5′ | 16833 | 16852 |
| 4896 | CCATAGTCACCTTTTTCAAA | NC_045512.2 | 3′→5′ | 16834 | 16853 |
| 4897 | ACCATAGTCACCTTTTTCAA | NC_045512.2 | 3′→5′ | 16835 | 16854 |
| 4898 | CACCATAGTCACCTTTTTCA | NC_045512.2 | 3′→5′ | 16836 | 16855 |
| 4899 | TCACCATAGTCACCTTTTTC | NC_045512.2 | 3′→5′ | 16837 | 16856 |
| 4900 | ATCACCATAGTCACCTTTTT | NC_045512.2 | 3′→5′ | 16838 | 16857 |
| 4901 | CATCACCATAGTCACCTTTT | NC_045512.2 | 3′→5′ | 16839 | 16858 |
| 4902 | GCATCACCATAGTCACCTTT | NC_045512.2 | 3′→5′ | 16840 | 16859 |
| 4903 | AGCATCACCATAGTCACCTT | NC_045512.2 | 3′→5′ | 16841 | 16860 |
| 4904 | CAGCATCACCATAGTCACCT | NC_045512.2 | 3′→5′ | 16842 | 16861 |
| 4905 | ACAGCATCACCATAGTCACC | NC_045512.2 | 3′→5′ | 16843 | 16862 |
| 4906 | AACAGCATCACCATAGTCAC | NC_045512.2 | 3′→5′ | 16844 | 16863 |
| 4907 | CAACAGCATCACCATAGTCA | NC_045512.2 | 3′→5′ | 16845 | 16864 |
| 4908 | ACAACAGCATCACCATAGTC | NC_045512.2 | 3′→5′ | 16846 | 16865 |
| 4909 | TAGTGCTCTTGTGGCACTAG | NC_045512.2 | 3′→5′ | 16954 | 16973 |
| 4910 | ATAGTGCTCTTGTGGCACTA | NC_045512.2 | 3′→5′ | 16955 | 16974 |
| 4911 | CATAGTGCTCTTGTGGCACT | NC_045512.2 | 3′→5′ | 16956 | 16975 |
| 4912 | ACATAGTGCTCTTGTGGCAC | NC_045512.2 | 3′→5′ | 16957 | 16976 |
| 4913 | CTAGAAAACTCATCTGAGAT | NC_045512.2 | 3′→5′ | 17008 | 17027 |
| 4914 | GCTAGAAAACTCATCTGAGA | NC_045512.2 | 3′→5′ | 17009 | 17028 |
| 4915 | TGCTAGAAAACTCATCTGAG | NC_045512.2 | 3′→5′ | 17010 | 17029 |
| 4916 | TTGCTAGAAAACTCATCTGA | NC_045512.2 | 3′→5′ | 17011 | 17030 |
| 4917 | ATTGCTAGAAAACTCATCTG | NC_045512.2 | 3′→5′ | 17012 | 17031 |
| 4918 | CATTGCTAGAAAACTCATCT | NC_045512.2 | 3′→5′ | 17013 | 17032 |
| 4919 | ACATTGCTAGAAAACTCATC | NC_045512.2 | 3′→5′ | 17014 | 17033 |
| 4920 | AACATTGCTAGAAAACTCAT | NC_045512.2 | 3′→5′ | 17015 | 17034 |
| 4921 | CAACATTGCTAGAAAACTCA | NC_045512.2 | 3′→5′ | 17016 | 17035 |
| 4922 | GCAACATTGCTAGAAAACTC | NC_045512.2 | 3′→5′ | 17017 | 17036 |
| 4923 | TGCAACATTGCTAGAAAACT | NC_045512.2 | 3′→5′ | 17018 | 17037 |
| 4924 | TTGCAACATTGCTAGAAAAC | NC_045512.2 | 3′→5′ | 17019 | 17038 |
| 4925 | TTTGCAACATTGCTAGAAAA | NC_045512.2 | 3′→5′ | 17020 | 17039 |
| 4926 | ATTTGCAACATTGCTAGAAA | NC_045512.2 | 3′→5′ | 17021 | 17040 |
| 4927 | AATTTGCAACATTGCTAGAA | NC_045512.2 | 3′→5′ | 17022 | 17041 |
| 4928 | TAATTTGCAACATTGCTAGA | NC_045512.2 | 3′→5′ | 17023 | 17042 |
| 4929 | TTACCAGTACCAGGTGGTCC | NC_045512.2 | 3′→5′ | 17080 | 17099 |
| 4930 | CTTACCAGTACCAGGTGGTC | NC_045512.2 | 3′→5′ | 17081 | 17100 |
| 4931 | TCTTACCAGTACCAGGTGGT | NC_045512.2 | 3′→5′ | 17082 | 17101 |
| 4932 | CTCTTACCAGTACCAGGTGG | NC_045512.2 | 3′→5′ | 17083 | 17102 |
| 4933 | ACTCTTACCAGTACCAGGTG | NC_045512.2 | 3′→5′ | 17084 | 17103 |
| 4934 | GACTCTTACCAGTACCAGGT | NC_045512.2 | 3′→5′ | 17085 | 17104 |
| 4935 | TGACTCTTACCAGTACCAGG | NC_045512.2 | 3′→5′ | 17086 | 17105 |
| 4936 | ATGACTCTTACCAGTACCAG | NC_045512.2 | 3′→5′ | 17087 | 17106 |
| 4937 | AATGACTCTTACCAGTACCA | NC_045512.2 | 3′→5′ | 17088 | 17107 |
| 4938 | AAATGACTCTTACCAGTACC | NC_045512.2 | 3′→5′ | 17089 | 17108 |
| 4939 | AAAATGACTCTTACCAGTAC | NC_045512.2 | 3′→5′ | 17090 | 17109 |
| 4940 | CAAAATGACTCTTACCAGTA | NC_045512.2 | 3′→5′ | 17091 | 17110 |
| 4941 | GCAAAATGACTCTTACCAGT | NC_045512.2 | 3′→5′ | 17092 | 17111 |
| 4942 | GTATACACTATGCGAGCAGA | NC_045512.2 | 3′→5′ | 17137 | 17156 |
| 4943 | GTTGAATTCACTTTGAATTT | NC_045512.2 | 3′→5′ | 17269 | 17288 |
| 4944 | TGTTGAATTCACTTTGAATT | NC_045512.2 | 3′→5′ | 17270 | 17289 |
| 4945 | AGGAACATGTCTGGACCTAT | NC_045512.2 | 3′→5′ | 17530 | 17549 |
| 4946 | ACAATTTCAGCAGGACAACG | NC_045512.2 | 3′→5′ | 17563 | 17582 |
| 4947 | ATTGCAGATGAAACATCATG | NC_045512.2 | 3′→5′ | 17680 | 17699 |
| 4948 | ACAGCTTTTCTCCAAGCAGG | NC_045512.2 | 3′→5′ | 17746 | 17765 |
| 4949 | GTGAATATGACATAGTCATA | NC_045512.2 | 3′→5′ | 17857 | 17876 |
| 4950 | TCTCTATCAGACATTATGCA | NC_045512.2 | 3′→5′ | 17956 | 17975 |
| 4951 | AGGTGTGTAGGTGCCTGTGT | NC_045512.2 | 3′→5′ | 18100 | 18119 |
| 4952 | GAGGTGTGTAGGTGCCTGTG | NC_045512.2 | 3′→5′ | 18101 | 18120 |
| 4953 | TGAGGTGTGTAGGTGCCTGT | NC_045512.2 | 3′→5′ | 18102 | 18121 |
| 4954 | CTGAGGTGTGTAGGTGCCTG | NC_045512.2 | 3′→5′ | 18103 | 18122 |
| 4955 | CCCATCATAGAGATGAGTCT | NC_045512.2 | 3′→5′ | 18196 | 18215 |
| 4956 | ACCCATCATAGAGATGAGTC | NC_045512.2 | 3′→5′ | 18197 | 18216 |
| 4957 | AACCCATCATAGAGATGAGT | NC_045512.2 | 3′→5′ | 18198 | 18217 |
| 4958 | AAACCCATCATAGAGATGAG | NC_045512.2 | 3′→5′ | 18199 | 18218 |
| 4959 | GCCACATTTTCTAAACTCTG | NC_045512.2 | 3′→5′ | 19618 | 19637 |
| 4960 | AGCCACATTTTCTAAACTCT | NC_045512.2 | 3′→5′ | 19619 | 19638 |
| 4961 | AAGCCACATTTTCTAAACTC | NC_045512.2 | 3′→5′ | 19620 | 19639 |
| 4962 | CGCTTAGCCCAAAGCTCAAA | NC_045512.2 | 3′→5′ | 19783 | 19802 |
| 4963 | ACACCCAAATTATTGAGTAT | NC_045512.2 | 3′→5′ | 19831 | 19850 |
| 4964 | CCAATTAATGTGACTCCATT | NC_045512.2 | 3′→5′ | 20107 | 20126 |
| 4965 | TCCAATTAATGTGACTCCAT | NC_045512.2 | 3′→5′ | 20108 | 20127 |
| 4966 | CTCCAATTAATGTGACTCCA | NC_045512.2 | 3′→5′ | 20109 | 20128 |
| 4967 | TCTCCAATTAATGTGACTCC | NC_045512.2 | 3′→5′ | 20110 | 20129 |
| 4968 | TTCTCCAATTAATGTGACTC | NC_045512.2 | 3′→5′ | 20111 | 20130 |
| 4969 | TTTGCGACATTCATCATTAT | NC_045512.2 | 3′→5′ | 20776 | 20795 |
| 4970 | ACTCTGTTGTTTTCTCTAAT | NC_045512.2 | 3′→5′ | 21502 | 21521 |
| 4971 | AACTCTGTTGTTTTCTCTAA | NC_045512.2 | 3′→5′ | 21503 | 21522 |
| 4972 | CAACTCTGTTGTTTTCTCTA | NC_045512.2 | 3′→5′ | 21504 | 21523 |
| 4973 | ACAACTCTGTTGTTTTCTCT | NC_045512.2 | 3′→5′ | 21505 | 21524 |
| 4974 | TGGTTCTCATAGAGAACATT | NC_045512.2 | 3′→5′ | 24302 | 24321 |
| 4975 | TTGGTTCTCATAGAGAACAT | NC_045512.2 | 3′→5′ | 24303 | 24322 |
| 4976 | TTTGGTTCTCATAGAGAACA | NC_045512.2 | 3′→5′ | 24304 | 24323 |
| 4977 | TTTTGGTTCTCATAGAGAAC | NC_045512.2 | 3′→5′ | 24305 | 24324 |
| 4978 | TTTTTGGTTCTCATAGAGAA | NC_045512.2 | 3′→5′ | 24306 | 24325 |
| 4979 | GAGCTAAGTTGTTTAACAAG | NC_045512.2 | 3′→5′ | 24446 | 24465 |
| 4980 | GCAGCAAGATTAGCAGAAGC | NC_045512.2 | 3′→5′ | 24620 | 24639 |
| 4981 | AGCAGCAAGATTAGCAGAAG | NC_045512.2 | 3′→5′ | 24621 | 24640 |
| 4982 | TAGCAGCAAGATTAGCAGAA | NC_045512.2 | 3′→5′ | 24622 | 24641 |
| 4983 | GTAGCAGCAAGATTAGCAGA | NC_045512.2 | 3′→5′ | 24623 | 24642 |
| 4984 | AGTAGCAGCAAGATTAGCAG | NC_045512.2 | 3′→5′ | 24624 | 24643 |
| 4985 | TAGTAGCAGCAAGATTAGCA | NC_045512.2 | 3′→5′ | 24625 | 24644 |
| 4986 | TTAGTAGCAGCAAGATTAGC | NC_045512.2 | 3′→5′ | 24626 | 24645 |
| 4987 | TTTAGTAGCAGCAAGATTAG | NC_045512.2 | 3′→5′ | 24627 | 24646 |
| 4988 | TTTTAGTAGCAGCAAGATTA | NC_045512.2 | 3′→5′ | 24628 | 24647 |
| 4989 | ATTTTAGTAGCAGCAAGATT | NC_045512.2 | 3′→5′ | 24629 | 24648 |
| 4990 | CATTTTAGTAGCAGCAAGAT | NC_045512.2 | 3′→5′ | 24630 | 24649 |
| 4991 | ACATTTTAGTAGCAGCAAGA | NC_045512.2 | 3′→5′ | 24631 | 24650 |
| 4992 | GACATTTTAGTAGCAGCAAG | NC_045512.2 | 3′→5′ | 24632 | 24651 |
| 4993 | ACTCTTTTTGATTGTCCAAG | NC_045512.2 | 3′→5′ | 24662 | 24681 |
| 4994 | AACTCTTTTTGATTGTCCAA | NC_045512.2 | 3′→5′ | 24663 | 24682 |
| 4995 | CAACTCTTTTTGATTGTCCA | NC_045512.2 | 3′→5′ | 24664 | 24683 |
| 4996 | TCAACTCTTTTTGATTGTCC | NC_045512.2 | 3′→5′ | 24665 | 24684 |
| 4997 | ACATCTGGTGATGTATGATT | NC_045512.2 | 3′→5′ | 25034 | 25053 |
| 4998 | AACATCTGGTGATGTATGAT | NC_045512.2 | 3′→5′ | 25035 | 25054 |
| 4999 | CAACATCTGGTGATGTATGA | NC_045512.2 | 3′→5′ | 25036 | 25055 |
| 5000 | TCAACATCTGGTGATGTATG | NC_045512.2 | 3′→5′ | 25037 | 25056 |
| 5001 | ATCAACATCTGGTGATGTAT | NC_045512.2 | 3′→5′ | 25038 | 25057 |
| 5002 | ATTGAGGCGGTCAATTTCTT | NC_045512.2 | 3′→5′ | 25104 | 25123 |
| 5003 | CATTGAGGCGGTCAATTTCT | NC_045512.2 | 3′→5′ | 25105 | 25124 |
| 5004 | TCATTGAGGCGGTCAATTTC | NC_045512.2 | 3′→5′ | 25106 | 25125 |
| 5005 | CTCATTGAGGCGGTCAATTT | NC_045512.2 | 3′→5′ | 25107 | 25126 |
| 5006 | CCTCATTGAGGCGGTCAATT | NC_045512.2 | 3′→5′ | 25108 | 25127 |
| 5007 | ACCTCATTGAGGCGGTCAAT | NC_045512.2 | 3′→5′ | 25109 | 25128 |
| 5008 | TATGTGTAATGTAATTTGAC | NC_045512.2 | 3′→5′ | 25364 | 25383 |
| 5009 | TTATGTGTAATGTAATTTGA | NC_045512.2 | 3′→5′ | 25365 | 25384 |
| 5010 | TTTATGTGTAATGTAATTTG | NC_045512.2 | 3′→5′ | 25366 | 25385 |
| 5011 | GTTTATGTGTAATGTAATTT | NC_045512.2 | 3′→5′ | 25367 | 25386 |
| 5012 | CGTTTATGTGTAATGTAATT | NC_045512.2 | 3′→5′ | 25368 | 25387 |
| 5013 | GAAAGGGAGTGAGGCTTGTA | NC_045512.2 | 3′→5′ | 25502 | 25521 |
| 5014 | CGAAAGGGAGTGAGGCTTGT | NC_045512.2 | 3′→5′ | 25503 | 25522 |
| 5015 | CCGAAAGGGAGTGAGGCTTG | NC_045512.2 | 3′→5′ | 25504 | 25523 |
| 5016 | TCCGAAAGGGAGTGAGGCTT | NC_045512.2 | 3′→5′ | 25505 | 25524 |
| 5017 | ATCCGAAAGGGAGTGAGGCT | NC_045512.2 | 3′→5′ | 25506 | 25525 |
| 5018 | CATCCGAAAGGGAGTGAGGC | NC_045512.2 | 3′→5′ | 25507 | 25526 |
| 5019 | CCATCCGAAAGGGAGTGAGG | NC_045512.2 | 3′→5′ | 25508 | 25527 |
| 5020 | GCCATCCGAAAGGGAGTGAG | NC_045512.2 | 3′→5′ | 25509 | 25528 |
| 5021 | AGCCATCCGAAAGGGAGTGA | NC_045512.2 | 3′→5′ | 25510 | 25529 |
| 5022 | AAGCCATCCGAAAGGGAGTG | NC_045512.2 | 3′→5′ | 25511 | 25530 |
| 5023 | ACGCTAGTAGTCGTCGTCGG | NC_045512.2 | 3′→5′ | 26191 | 26210 |
| 5024 | CACGCTAGTAGTCGTCGTCG | NC_045512.2 | 3′→5′ | 26192 | 26211 |
| 5025 | GCACGCTAGTAGTCGTCGTC | NC_045512.2 | 3′→5′ | 26193 | 26212 |
| 5026 | GGCACGCTAGTAGTCGTCGT | NC_045512.2 | 3′→5′ | 26194 | 26213 |
| 5027 | AGGCACGCTAGTAGTCGTCG | NC_045512.2 | 3′→5′ | 26195 | 26214 |
| 5028 | AAGGCACGCTAGTAGTCGTC | NC_045512.2 | 3′→5′ | 26196 | 26215 |
| 5029 | AAAGGCACGCTAGTAGTCGT | NC_045512.2 | 3′→5′ | 26197 | 26216 |
| 5030 | CAAAGGCACGCTAGTAGTCG | NC_045512.2 | 3′→5′ | 26198 | 26217 |
| 5031 | ACAAAGGCACGCTAGTAGTC | NC_045512.2 | 3′→5′ | 26199 | 26218 |
| 5032 | TACAAAGGCACGCTAGTAGT | NC_045512.2 | 3′→5′ | 26200 | 26219 |
| 5033 | TTACAAAGGCACGCTAGTAG | NC_045512.2 | 3′→5′ | 26201 | 26220 |
| 5034 | CTTACAAAGGCACGCTAGTA | NC_045512.2 | 3′→5′ | 26202 | 26221 |
| 5035 | GCTTACAAAGGCACGCTAGT | NC_045512.2 | 3′→5′ | 26203 | 26222 |
| 5036 | TGCTTACAAAGGCACGCTAG | NC_045512.2 | 3′→5′ | 26204 | 26223 |
| 5037 | GTGCTTACAAAGGCACGCTA | NC_045512.2 | 3′→5′ | 26205 | 26224 |
| 5038 | TGTGCTTACAAAGGCACGCT | NC_045512.2 | 3′→5′ | 26206 | 26225 |
| 5039 | TTGTGCTTACAAAGGCACGC | NC_045512.2 | 3′→5′ | 26207 | 26226 |
| 5040 | CTTGTGCTTACAAAGGCACG | NC_045512.2 | 3′→5′ | 26208 | 26227 |
| 5041 | AGTACATAAGTTCGTACTCA | NC_045512.2 | 3′→5′ | 26232 | 26251 |
| 5042 | GAGTACATAAGTTCGTACTC | NC_045512.2 | 3′→5′ | 26233 | 26252 |
| 5043 | TGAGTACATAAGTTCGTACT | NC_045512.2 | 3′→5′ | 26234 | 26253 |
| 5044 | ATGAGTACATAAGTTCGTAC | NC_045512.2 | 3′→5′ | 26235 | 26254 |
| 5045 | AATGAGTACATAAGTTCGTA | NC_045512.2 | 3′→5′ | 26236 | 26255 |
| 5046 | GAATGAGTACATAAGTTCGT | NC_045512.2 | 3′→5′ | 26237 | 26256 |
| 5047 | CGAATGAGTACATAAGTTCG | NC_045512.2 | 3′→5′ | 26238 | 26257 |
| 5048 | ACGAATGAGTACATAAGTTC | NC_045512.2 | 3′→5′ | 26239 | 26258 |
| 5049 | AACGAATGAGTACATAAGTT | NC_045512.2 | 3′→5′ | 26240 | 26259 |
| 5050 | AAACGAATGAGTACATAAGT | NC_045512.2 | 3′→5′ | 26241 | 26260 |
| 5051 | GAAACGAATGAGTACATAAG | NC_045512.2 | 3′→5′ | 26242 | 26261 |
| 5052 | CGAAACGAATGAGTACATAA | NC_045512.2 | 3′→5′ | 26243 | 26262 |
| 5053 | CCGAAACGAATGAGTACATA | NC_045512.2 | 3′→5′ | 26244 | 26263 |
| 5054 | TCCGAAACGAATGAGTACAT | NC_045512.2 | 3′→5′ | 26245 | 26264 |
| 5055 | TTCCGAAACGAATGAGTACA | NC_045512.2 | 3′→5′ | 26246 | 26265 |
| 5056 | CTTCCGAAACGAATGAGTAC | NC_045512.2 | 3′→5′ | 26247 | 26266 |
| 5057 | TCTTCCGAAACGAATGAGTA | NC_045512.2 | 3′→5′ | 26248 | 26267 |
| 5058 | TTAACTATTAACGTACCTGT | NC_045512.2 | 3′→5′ | 26269 | 26288 |
| 5059 | ATTAACTATTAACGTACCTG | NC_045512.2 | 3′→5′ | 26270 | 26289 |
| 5060 | TATTAACTATTAACGTACCT | NC_045512.2 | 3′→5′ | 26271 | 26290 |
| 5061 | CTATTAACTATTAACGTACC | NC_045512.2 | 3′→5′ | 26272 | 26291 |
| 5062 | GCTATTAACTATTAACGTAC | NC_045512.2 | 3′→5′ | 26273 | 26292 |
| 5063 | CGCTATTAACTATTAACGTA | NC_045512.2 | 3′→5′ | 26274 | 26293 |
| 5064 | ACGCTATTAACTATTAACGT | NC_045512.2 | 3′→5′ | 26275 | 26294 |
| 5065 | TACGCTATTAACTATTAACG | NC_045512.2 | 3′→5′ | 26276 | 26295 |
| 5066 | GTACGCTATTAACTATTAAC | NC_045512.2 | 3′→5′ | 26277 | 26296 |
| 5067 | AGTACGCTATTAACTATTAA | NC_045512.2 | 3′→5′ | 26278 | 26297 |
| 5068 | AAGTACGCTATTAACTATTA | NC_045512.2 | 3′→5′ | 26279 | 26298 |
| 5069 | GAAGTACGCTATTAACTATT | NC_045512.2 | 3′→5′ | 26280 | 26299 |
| 5070 | AGAAGTACGCTATTAACTAT | NC_045512.2 | 3′→5′ | 26281 | 26300 |
| 5071 | AAGAAGTACGCTATTAACTA | NC_045512.2 | 3′→5′ | 26282 | 26301 |
| 5072 | AAAGAAGTACGCTATTAACT | NC_045512.2 | 3′→5′ | 26283 | 26302 |
| 5073 | AAAAGAAGTACGCTATTAAC | NC_045512.2 | 3′→5′ | 26284 | 26303 |
| 5074 | AAAAAGAAGTACGCTATTAA | NC_045512.2 | 3′→5′ | 26285 | 26304 |
| 5075 | GAAAAAGAAGTACGCTATTA | NC_045512.2 | 3′→5′ | 26286 | 26305 |
| 5076 | AGAAAAAGAAGTACGCTATT | NC_045512.2 | 3′→5′ | 26287 | 26306 |
| 5077 | AAGAAAAAGAAGTACGCTAT | NC_045512.2 | 3′→5′ | 26288 | 26307 |
| 5078 | CAAGAAAAAGAAGTACGCTA | NC_045512.2 | 3′→5′ | 26289 | 26308 |
| 5079 | GCAAGAAAAAGAAGTACGCT | NC_045512.2 | 3′→5′ | 26290 | 26309 |
| 5080 | AGCAAGAAAAAGAAGTACGC | NC_045512.2 | 3′→5′ | 26291 | 26310 |
| 5081 | AAGCAAGAAAAAGAAGTACG | NC_045512.2 | 3′→5′ | 26292 | 26311 |
| 5082 | AAAGCAAGAAAAAGAAGTAC | NC_045512.2 | 3′→5′ | 26293 | 26312 |
| 5083 | GAAAGCAAGAAAAAGAAGTA | NC_045512.2 | 3′→5′ | 26294 | 26313 |
| 5084 | CGAAAGCAAGAAAAAGAAGT | NC_045512.2 | 3′→5′ | 26295 | 26314 |
| 5085 | ACGAAAGCAAGAAAAAGAAG | NC_045512.2 | 3′→5′ | 26296 | 26315 |
| 5086 | CACGAAAGCAAGAAAAAGAA | NC_045512.2 | 3′→5′ | 26297 | 26316 |
| 5087 | CCACGAAAGCAAGAAAAAGA | NC_045512.2 | 3′→5′ | 26298 | 26317 |
| 5088 | ACCACGAAAGCAAGAAAAAG | NC_045512.2 | 3′→5′ | 26299 | 26318 |
| 5089 | TACCACGAAAGCAAGAAAAA | NC_045512.2 | 3′→5′ | 26300 | 26319 |
| 5090 | ATACCACGAAAGCAAGAAAA | NC_045512.2 | 3′→5′ | 26301 | 26320 |
| 5091 | AATACCACGAAAGCAAGAAA | NC_045512.2 | 3′→5′ | 26302 | 26321 |
| 5092 | GAATACCACGAAAGCAAGAA | NC_045512.2 | 3′→5′ | 26303 | 26322 |
| 5093 | AGAATACCACGAAAGCAAGA | NC_045512.2 | 3′→5′ | 26304 | 26323 |
| 5094 | AAGAATACCACGAAAGCAAG | NC_045512.2 | 3′→5′ | 26305 | 26324 |
| 5095 | CAAGAATACCACGAAAGCAA | NC_045512.2 | 3′→5′ | 26306 | 26325 |
| 5096 | GCAAGAATACCACGAAAGCA | NC_045512.2 | 3′→5′ | 26307 | 26326 |
| 5097 | AGCAAGAATACCACGAAAGC | NC_045512.2 | 3′→5′ | 26308 | 26327 |
| 5098 | TAGCAAGAATACCACGAAAG | NC_045512.2 | 3′→5′ | 26309 | 26328 |
| 5099 | CTAGCAAGAATACCACGAAA | NC_045512.2 | 3′→5′ | 26310 | 26329 |
| 5100 | ACTAGCAAGAATACCACGAA | NC_045512.2 | 3′→5′ | 26311 | 26330 |
| 5101 | GCAGTAAGGATGGCTAGTGT | NC_045512.2 | 3′→5′ | 26332 | 26351 |
| 5102 | CGCAGTAAGGATGGCTAGTG | NC_045512.2 | 3′→5′ | 26333 | 26352 |
| 5103 | GCGCAGTAAGGATGGCTAGT | NC_045512.2 | 3′→5′ | 26334 | 26353 |
| 5104 | AGCGCAGTAAGGATGGCTAG | NC_045512.2 | 3′→5′ | 26335 | 26354 |
| 5105 | AAGCGCAGTAAGGATGGCTA | NC_045512.2 | 3′→5′ | 26336 | 26355 |
| 5106 | GAAGCGCAGTAAGGATGGCT | NC_045512.2 | 3′→5′ | 26337 | 26356 |
| 5107 | CGAAGCGCAGTAAGGATGGC | NC_045512.2 | 3′→5′ | 26338 | 26357 |
| 5108 | TCGAAGCGCAGTAAGGATGG | NC_045512.2 | 3′→5′ | 26339 | 26358 |
| 5109 | ATCGAAGCGCAGTAAGGATG | NC_045512.2 | 3′→5′ | 26340 | 26359 |
| 5110 | AATCGAAGCGCAGTAAGGAT | NC_045512.2 | 3′→5′ | 26341 | 26360 |
| 5111 | CAATCGAAGCGCAGTAAGGA | NC_045512.2 | 3′→5′ | 26342 | 26361 |
| 5112 | ACAATCGAAGCGCAGTAAGG | NC_045512.2 | 3′→5′ | 26343 | 26362 |
| 5113 | CACAATCGAAGCGCAGTAAG | NC_045512.2 | 3′→5′ | 26344 | 26363 |
| 5114 | ACACAATCGAAGCGCAGTAA | NC_045512.2 | 3′→5′ | 26345 | 26364 |
| 5115 | CACACAATCGAAGCGCAGTA | NC_045512.2 | 3′→5′ | 26346 | 26365 |
| 5116 | GCACACAATCGAAGCGCAGT | NC_045512.2 | 3′→5′ | 26347 | 26366 |
| 5117 | CGCACACAATCGAAGCGCAG | NC_045512.2 | 3′→5′ | 26348 | 26367 |
| 5118 | ACGCACACAATCGAAGCGCA | NC_045512.2 | 3′→5′ | 26349 | 26368 |
| 5119 | TACGCACACAATCGAAGCGC | NC_045512.2 | 3′→5′ | 26350 | 26369 |
| 5120 | GTACGCACACAATCGAAGCG | NC_045512.2 | 3′→5′ | 26351 | 26370 |
| 5121 | AGTACGCACACAATCGAAGC | NC_045512.2 | 3′→5′ | 26352 | 26371 |
| 5122 | CAGTACGCACACAATCGAAG | NC_045512.2 | 3′→5′ | 26353 | 26372 |
| 5123 | GCAGTACGCACACAATCGAA | NC_045512.2 | 3′→5′ | 26354 | 26373 |
| 5124 | AGCAGTACGCACACAATCGA | NC_045512.2 | 3′→5′ | 26355 | 26374 |
| 5125 | CAGCAGTACGCACACAATCG | NC_045512.2 | 3′→5′ | 26356 | 26375 |
| 5126 | GCAGCAGTACGCACACAATC | NC_045512.2 | 3′→5′ | 26357 | 26376 |
| 5127 | TGCAGCAGTACGCACACAAT | NC_045512.2 | 3′→5′ | 26358 | 26377 |
| 5128 | TTGCAGCAGTACGCACACAA | NC_045512.2 | 3′→5′ | 26359 | 26378 |
| 5129 | ATTGCAGCAGTACGCACACA | NC_045512.2 | 3′→5′ | 26360 | 26379 |
| 5130 | TATTGCAGCAGTACGCACAC | NC_045512.2 | 3′→5′ | 26361 | 26380 |
| 5131 | ATATTGCAGCAGTACGCACA | NC_045512.2 | 3′→5′ | 26362 | 26381 |
| 5132 | AATATTGCAGCAGTACGCAC | NC_045512.2 | 3′→5′ | 26363 | 26382 |
| 5133 | CAATATTGCAGCAGTACGCA | NC_045512.2 | 3′→5′ | 26364 | 26383 |
| 5134 | ACAATATTGCAGCAGTACGC | NC_045512.2 | 3′→5′ | 26365 | 26384 |
| 5135 | AACAATATTGCAGCAGTACG | NC_045512.2 | 3′→5′ | 26366 | 26385 |
| 5136 | TAACAATATTGCAGCAGTAC | NC_045512.2 | 3′→5′ | 26367 | 26386 |
| 5137 | TTAACAATATTGCAGCAGTA | NC_045512.2 | 3′→5′ | 26368 | 26387 |
| 5138 | GTTAACAATATTGCAGCAGT | NC_045512.2 | 3′→5′ | 26369 | 26388 |
| 5139 | CGTTAACAATATTGCAGCAG | NC_045512.2 | 3′→5′ | 26370 | 26389 |
| 5140 | ACGTTAACAATATTGCAGCA | NC_045512.2 | 3′→5′ | 26371 | 26390 |
| 5141 | CACGTTAACAATATTGCAGC | NC_045512.2 | 3′→5′ | 26372 | 26391 |
| 5142 | TCACGTTAACAATATTGCAG | NC_045512.2 | 3′→5′ | 26373 | 26392 |
| 5143 | CTCACGTTAACAATATTGCA | NC_045512.2 | 3′→5′ | 26374 | 26393 |
| 5144 | ACTCACGTTAACAATATTGC | NC_045512.2 | 3′→5′ | 26375 | 26394 |
| 5145 | GACCAGAAGATCAGGAACTC | NC_045512.2 | 3′→5′ | 26450 | 26469 |
| 5146 | AGACCAGAAGATCAGGAACT | NC_045512.2 | 3′→5′ | 26451 | 26470 |
| 5147 | TAGACCAGAAGATCAGGAAC | NC_045512.2 | 3′→5′ | 26452 | 26471 |
| 5148 | TTAGACCAGAAGATCAGGAA | NC_045512.2 | 3′→5′ | 26453 | 26472 |
| 5149 | TTTAGACCAGAAGATCAGGA | NC_045512.2 | 3′→5′ | 26454 | 26473 |
| 5150 | GTTTAGACCAGAAGATCAGG | NC_045512.2 | 3′→5′ | 26455 | 26474 |
| 5151 | CGTTTAGACCAGAAGATCAG | NC_045512.2 | 3′→5′ | 26456 | 26475 |
| 5152 | TCGTTTAGACCAGAAGATCA | NC_045512.2 | 3′→5′ | 26457 | 26476 |
| 5153 | TTCGTTTAGACCAGAAGATC | NC_045512.2 | 3′→5′ | 26458 | 26477 |
| 5154 | GTTCGTTTAGACCAGAAGAT | NC_045512.2 | 3′→5′ | 26459 | 26478 |
| 5155 | AGTTCGTTTAGACCAGAAGA | NC_045512.2 | 3′→5′ | 26460 | 26479 |
| 5156 | TAGTTCGTTTAGACCAGAAG | NC_045512.2 | 3′→5′ | 26461 | 26480 |
| 5157 | TTAGTTCGTTTAGACCAGAA | NC_045512.2 | 3′→5′ | 26462 | 26481 |
| 5158 | ATTACTAGGTTCCATTGTTC | NC_045512.2 | 3′→5′ | 26574 | 26593 |
| 5159 | TATTACTAGGTTCCATTGTT | NC_045512.2 | 3′→5′ | 26575 | 26594 |
| 5160 | CTATTACTAGGTTCCATTGT | NC_045512.2 | 3′→5′ | 26576 | 26595 |
| 5161 | CCTATTACTAGGTTCCATTG | NC_045512.2 | 3′→5′ | 26577 | 26596 |
| 5162 | ACCTATTACTAGGTTCCATT | NC_045512.2 | 3′→5′ | 26578 | 26597 |
| 5163 | AACCTATTACTAGGTTCCAT | NC_045512.2 | 3′→5′ | 26579 | 26598 |
| 5164 | AAACCTATTACTAGGTTCCA | NC_045512.2 | 3′→5′ | 26580 | 26599 |
| 5165 | GAAACCTATTACTAGGTTCC | NC_045512.2 | 3′→5′ | 26581 | 26600 |
| 5166 | GAAAGCGTTCGTGATGTAGC | NC_045512.2 | 3′→5′ | 27033 | 27052 |
| 5167 | AGAAAGCGTTCGTGATGTAG | NC_045512.2 | 3′→5′ | 27034 | 27053 |
| 5168 | AAGAAAGCGTTCGTGATGTA | NC_045512.2 | 3′→5′ | 27035 | 27054 |
| 5169 | TAAGAAAGCGTTCGTGATGT | NC_045512.2 | 3′→5′ | 27036 | 27055 |
| 5170 | ATAAGAAAGCGTTCGTGATG | NC_045512.2 | 3′→5′ | 27037 | 27056 |
| 5171 | AATAAGAAAGCGTTCGTGAT | NC_045512.2 | 3′→5′ | 27038 | 27057 |
| 5172 | TAATAAGAAAGCGTTCGTGA | NC_045512.2 | 3′→5′ | 27039 | 27058 |
| 5173 | GTAATAAGAAAGCGTTCGTG | NC_045512.2 | 3′→5′ | 27040 | 27059 |
| 5174 | TGTAATAAGAAAGCGTTCGT | NC_045512.2 | 3′→5′ | 27041 | 27060 |
| 5175 | TTGTAATAAGAAAGCGTTCG | NC_045512.2 | 3′→5′ | 27042 | 27061 |
| 5176 | TTTGTAATAAGAAAGCGTTC | NC_045512.2 | 3′→5′ | 27043 | 27062 |
| 5177 | ATTTGTAATAAGAAAGCGTT | NC_045512.2 | 3′→5′ | 27044 | 27063 |
| 5178 | AATTTGTAATAAGAAAGCGT | NC_045512.2 | 3′→5′ | 27045 | 27064 |
| 5179 | TCTGTTGTCACTTACTGTAC | NC_045512.2 | 3′→5′ | 27183 | 27202 |
| 5180 | ATCTGTTGTCACTTACTGTA | NC_045512.2 | 3′→5′ | 27184 | 27203 |
| 5181 | CATCTGTTGTCACTTACTGT | NC_045512.2 | 3′→5′ | 27185 | 27204 |
| 5182 | ACATCTGTTGTCACTTACTG | NC_045512.2 | 3′→5′ | 27186 | 27205 |
| 5183 | AACATCTGTTGTCACTTACT | NC_045512.2 | 3′→5′ | 27187 | 27206 |
| 5184 | AAACATCTGTTGTCACTTAC | NC_045512.2 | 3′→5′ | 27188 | 27207 |
| 5185 | GAAACATCTGTTGTCACTTA | NC_045512.2 | 3′→5′ | 27189 | 27208 |
| 5186 | TGAAACATCTGTTGTCACTT | NC_045512.2 | 3′→5′ | 27190 | 27209 |
| 5187 | ATGAAACATCTGTTGTCACT | NC_045512.2 | 3′→5′ | 27191 | 27210 |
| 5188 | GATGAAACATCTGTTGTCAC | NC_045512.2 | 3′→5′ | 27192 | 27211 |
| 5189 | AGATGAAACATCTGTTGTCA | NC_045512.2 | 3′→5′ | 27193 | 27212 |
| 5190 | ATTTTCATGTTCGTTTAATC | NC_045512.2 | 3′→5′ | 27382 | 27401 |
| 5191 | AATTTTCATGTTCGTTTAAT | NC_045512.2 | 3′→5′ | 27383 | 27402 |
| 5192 | TAATTTTCATGTTCGTTTAA | NC_045512.2 | 3′→5′ | 27384 | 27403 |
| 5193 | ATAATTTTCATGTTCGTTTA | NC_045512.2 | 3′→5′ | 27385 | 27404 |
| 5194 | AATAATTTTCATGTTCGTTT | NC_045512.2 | 3′→5′ | 27386 | 27405 |
| 5195 | GAATAATTTTCATGTTCGTT | NC_045512.2 | 3′→5′ | 27387 | 27406 |
| 5196 | AGAATAATTTTCATGTTCGT | NC_045512.2 | 3′→5′ | 27388 | 27407 |
| 5197 | AATGGTGAATTGCCCTCGTA | NC_045512.2 | 3′→5′ | 27511 | 27530 |
| 5198 | AAATGGTGAATTGCCCTCGT | NC_045512.2 | 3′→5′ | 27512 | 27531 |
| 5199 | GAAATGGTGAATTGCCCTCG | NC_045512.2 | 3′→5′ | 27513 | 27532 |
| 5200 | TGAAATGGTGAATTGCCCTC | NC_045512.2 | 3′→5′ | 27514 | 27533 |
| 5201 | CACAAATAGAAGTCAATTAA | NC_045512.2 | 3′→5′ | 27771 | 27790 |
| 5202 | GCACAAATAGAAGTCAATTA | NC_045512.2 | 3′→5′ | 27772 | 27791 |
| 5203 | AGCACAAATAGAAGTCAATT | NC_045512.2 | 3′→5′ | 27773 | 27792 |
| 5204 | AAGCACAAATAGAAGTCAAT | NC_045512.2 | 3′→5′ | 27774 | 27793 |
| 5205 | AAAGCACAAATAGAAGTCAA | NC_045512.2 | 3′→5′ | 27775 | 27794 |
| 5206 | AAAAGCACAAATAGAAGTCA | NC_045512.2 | 3′→5′ | 27776 | 27795 |
| 5207 | AAAAAGCACAAATAGAAGTC | NC_045512.2 | 3′→5′ | 27777 | 27796 |
| 5208 | TAAAAAGCACAAATAGAAGT | NC_045512.2 | 3′→5′ | 27778 | 27797 |
| 5209 | CTAAAAAGCACAAATAGAAG | NC_045512.2 | 3′→5′ | 27779 | 27798 |
| 5210 | GCTAAAAAGCACAAATAGAA | NC_045512.2 | 3′→5′ | 27780 | 27799 |
| 5211 | GGCTAAAAAGCACAAATAGA | NC_045512.2 | 3′→5′ | 27781 | 27800 |
| 5212 | AGGCTAAAAAGCACAAATAG | NC_045512.2 | 3′→5′ | 27782 | 27801 |
| 5213 | AAGGCTAAAAAGCACAAATA | NC_045512.2 | 3′→5′ | 27783 | 27802 |
| 5214 | AAAGGCTAAAAAGCACAAAT | NC_045512.2 | 3′→5′ | 27784 | 27803 |
| 5215 | GAAAGGCTAAAAAGCACAAA | NC_045512.2 | 3′→5′ | 27785 | 27804 |
| 5216 | AGAAAGGCTAAAAAGCACAA | NC_045512.2 | 3′→5′ | 27786 | 27805 |
| 5217 | CAGAAAGGCTAAAAAGCACA | NC_045512.2 | 3′→5′ | 27787 | 27806 |
| 5218 | GCAGAAAGGCTAAAAAGCAC | NC_045512.2 | 3′→5′ | 27788 | 27807 |
| 5219 | AGCAGAAAGGCTAAAAAGCA | NC_045512.2 | 3′→5′ | 27789 | 27808 |
| 5220 | TAGCAGAAAGGCTAAAAAGC | NC_045512.2 | 3′→5′ | 27790 | 27809 |
| 5221 | ATAGCAGAAAGGCTAAAAAG | NC_045512.2 | 3′→5′ | 27791 | 27810 |
| 5222 | AATAGCAGAAAGGCTAAAAA | NC_045512.2 | 3′→5′ | 27792 | 27811 |
| 5223 | GAATAGCAGAAAGGCTAAAA | NC_045512.2 | 3′→5′ | 27793 | 27812 |
| 5224 | GGAATAGCAGAAAGGCTAAA | NC_045512.2 | 3′→5′ | 27794 | 27813 |
| 5225 | AGGAATAGCAGAAAGGCTAA | NC_045512.2 | 3′→5′ | 27795 | 27814 |
| 5226 | AAGGAATAGCAGAAAGGCTA | NC_045512.2 | 3′→5′ | 27796 | 27815 |
| 5227 | CAAGGAATAGCAGAAAGGCT | NC_045512.2 | 3′→5′ | 27797 | 27816 |
| 5228 | ACAAGGAATAGCAGAAAGGC | NC_045512.2 | 3′→5′ | 27798 | 27817 |
| 5229 | AACAAGGAATAGCAGAAAGG | NC_045512.2 | 3′→5′ | 27799 | 27818 |
| 5230 | GTCCATTATCAGACATTTTA | NC_045512.2 | 3′→5′ | 28270 | 28289 |
| 5231 | GGTCCATTATCAGACATTTT | NC_045512.2 | 3′→5′ | 28271 | 28290 |
| 5232 | GGGTCCATTATCAGACATTT | NC_045512.2 | 3′→5′ | 28272 | 28291 |
| 5233 | GGGGTCCATTATCAGACATT | NC_045512.2 | 3′→5′ | 28273 | 28292 |
| 5234 | TGGGGTCCATTATCAGACAT | NC_045512.2 | 3′→5′ | 28274 | 28293 |
| 5235 | TTGGGGTCCATTATCAGACA | NC_045512.2 | 3′→5′ | 28275 | 28294 |
| 5236 | TTTGGGGTCCATTATCAGAC | NC_045512.2 | 3′→5′ | 28276 | 28295 |
| 5237 | TTTTGGGGTCCATTATCAGA | NC_045512.2 | 3′→5′ | 28277 | 28296 |
| 5238 | TTATTGGGTAAACCTTGGGG | NC_045512.2 | 3′→5′ | 28397 | 28416 |
| 5239 | ATTATTGGGTAAACCTTGGG | NC_045512.2 | 3′→5′ | 28398 | 28417 |
| 5240 | TATTATTGGGTAAACCTTGG | NC_045512.2 | 3′→5′ | 28399 | 28418 |
| 5241 | GTATTATTGGGTAAACCTTG | NC_045512.2 | 3′→5′ | 28400 | 28419 |
| 5242 | AGTATTATTGGGTAAACCTT | NC_045512.2 | 3′→5′ | 28401 | 28420 |
| 5243 | CAGTATTATTGGGTAAACCT | NC_045512.2 | 3′→5′ | 28402 | 28421 |
| 5244 | GCAGTATTATTGGGTAAACC | NC_045512.2 | 3′→5′ | 28403 | 28422 |
| 5245 | CGCAGTATTATTGGGTAAAC | NC_045512.2 | 3′→5′ | 28404 | 28423 |
| 5246 | ACGCAGTATTATTGGGTAAA | NC_045512.2 | 3′→5′ | 28405 | 28424 |
| 5247 | GACGCAGTATTATTGGGTAA | NC_045512.2 | 3′→5′ | 28406 | 28425 |
| 5248 | AGACGCAGTATTATTGGGTA | NC_045512.2 | 3′→5′ | 28407 | 28426 |
| 5249 | AAGACGCAGTATTATTGGGT | NC_045512.2 | 3′→5′ | 28408 | 28427 |
| 5250 | CAAGACGCAGTATTATTGGG | NC_045512.2 | 3′→5′ | 28409 | 28428 |
| 5251 | CCAAGACGCAGTATTATTGG | NC_045512.2 | 3′→5′ | 28410 | 28429 |
| 5252 | ACCAAGACGCAGTATTATTG | NC_045512.2 | 3′→5′ | 28411 | 28430 |
| 5253 | AACCAAGACGCAGTATTATT | NC_045512.2 | 3′→5′ | 28412 | 28431 |
| 5254 | GAACCAAGACGCAGTATTAT | NC_045512.2 | 3′→5′ | 28413 | 28432 |
| 5255 | TGAACCAAGACGCAGTATTA | NC_045512.2 | 3′→5′ | 28414 | 28433 |
| 5256 | GTGAACCAAGACGCAGTATT | NC_045512.2 | 3′→5′ | 28415 | 28434 |
| 5257 | AGTAGCCAATTTGGTCATCT | NC_045512.2 | 3′→5′ | 28513 | 28532 |
| 5258 | TAGTAGCCAATTTGGTCATC | NC_045512.2 | 3′→5′ | 28514 | 28533 |
| 5259 | GTAGTAGCCAATTTGGTCAT | NC_045512.2 | 3′→5′ | 28515 | 28534 |
| 5260 | GGTAGTAGCCAATTTGGTCA | NC_045512.2 | 3′→5′ | 28516 | 28535 |
| 5261 | CGGTAGTAGCCAATTTGGTC | NC_045512.2 | 3′→5′ | 28517 | 28536 |
| 5262 | TCGGTAGTAGCCAATTTGGT | NC_045512.2 | 3′→5′ | 28518 | 28537 |
| 5263 | TTCGGTAGTAGCCAATTTGG | NC_045512.2 | 3′→5′ | 28519 | 28538 |
| 5264 | CTTCGGTAGTAGCCAATTTG | NC_045512.2 | 3′→5′ | 28520 | 28539 |
| 5265 | TCTTCGGTAGTAGCCAATTT | NC_045512.2 | 3′→5′ | 28521 | 28540 |
| 5266 | CTCTTCGGTAGTAGCCAATT | NC_045512.2 | 3′→5′ | 28522 | 28541 |
| 5267 | GCTCTTCGGTAGTAGCCAAT | NC_045512.2 | 3′→5′ | 28523 | 28542 |
| 5268 | AGCTCTTCGGTAGTAGCCAA | NC_045512.2 | 3′→5′ | 28524 | 28543 |
| 5269 | TAGCTCTTCGGTAGTAGCCA | NC_045512.2 | 3′→5′ | 28525 | 28544 |
| 5270 | GTAGCTCTTCGGTAGTAGCC | NC_045512.2 | 3′→5′ | 28526 | 28545 |
| 5271 | GGTAGCTCTTCGGTAGTAGC | NC_045512.2 | 3′→5′ | 28527 | 28546 |
| 5272 | TTCAAGGCTCCCTCAGTTGC | NC_045512.2 | 3′→5′ | 28673 | 28692 |
| 5273 | GGATTGCGGGTGCCAATGTG | NC_045512.2 | 3′→5′ | 28706 | 28725 |
| 5274 | AGGATTGCGGGTGCCAATGT | NC_045512.2 | 3′→5′ | 28707 | 28726 |
| 5275 | CTTGAGGAAGTTGTAGCACG | NC_045512.2 | 3′→5′ | 28744 | 28763 |
| 5276 | CCTTGAGGAAGTTGTAGCAC | NC_045512.2 | 3′→5′ | 28745 | 28764 |
| 5277 | TCCTTGAGGAAGTTGTAGCA | NC_045512.2 | 3′→5′ | 28746 | 28765 |
| 5278 | TTCCTTGAGGAAGTTGTAGC | NC_045512.2 | 3′→5′ | 28747 | 28766 |
| 5279 | GTTCCTTGAGGAAGTTGTAG | NC_045512.2 | 3′→5′ | 28748 | 28767 |
| 5280 | TGTTCCTTGAGGAAGTTGTA | NC_045512.2 | 3′→5′ | 28749 | 28768 |
| 5281 | TTGTTCCTTGAGGAAGTTGT | NC_045512.2 | 3′→5′ | 28750 | 28769 |
| 5282 | GTTGTTCCTTGAGGAAGTTG | NC_045512.2 | 3′→5′ | 28751 | 28770 |
| 5283 | TGTTGTTCCTTGAGGAAGTT | NC_045512.2 | 3′→5′ | 28752 | 28771 |
| 5284 | ATGTTGTTCCTTGAGGAAGT | NC_045512.2 | 3′→5′ | 28753 | 28772 |
| 5285 | AATGTTGTTCCTTGAGGAAG | NC_045512.2 | 3′→5′ | 28754 | 28773 |
| 5286 | CAATGTTGTTCCTTGAGGAA | NC_045512.2 | 3′→5′ | 28755 | 28774 |
| 5287 | GCAATGTTGTTCCTTGAGGA | NC_045512.2 | 3′→5′ | 28756 | 28775 |
| 5288 | GGCAATGTTGTTCCTTGAGG | NC_045512.2 | 3′→5′ | 28757 | 28776 |
| 5289 | TGGCAATGTTGTTCCTTGAG | NC_045512.2 | 3′→5′ | 28758 | 28777 |
| 5290 | TTGGCAATGTTGTTCCTTGA | NC_045512.2 | 3′→5′ | 28759 | 28778 |
| 5291 | TTTGGCAATGTTGTTCCTTG | NC_045512.2 | 3′→5′ | 28760 | 28779 |
| 5292 | TTTTGGCAATGTTGTTCCTT | NC_045512.2 | 3′→5′ | 28761 | 28780 |
| 5293 | CTTTTGGCAATGTTGTTCCT | NC_045512.2 | 3′→5′ | 28762 | 28781 |
| 5294 | CCTTTTGGCAATGTTGTTCC | NC_045512.2 | 3′→5′ | 28763 | 28782 |
| 5295 | GCCTTTTGGCAATGTTGTTC | NC_045512.2 | 3′→5′ | 28764 | 28783 |
| 5296 | AGCCTTTTGGCAATGTTGTT | NC_045512.2 | 3′→5′ | 28765 | 28784 |
| 5297 | AAGCCTTTTGGCAATGTTGT | NC_045512.2 | 3′→5′ | 28766 | 28785 |
| 5298 | GAAGCCTTTTGGCAATGTTG | NC_045512.2 | 3′→5′ | 28767 | 28786 |
| 5299 | AGAAGCCTTTTGGCAATGTT | NC_045512.2 | 3′→5′ | 28768 | 28787 |
| 5300 | TAGAAGCCTTTTGGCAATGT | NC_045512.2 | 3′→5′ | 28769 | 28788 |
| 5301 | GTAGAAGCCTTTTGGCAATG | NC_045512.2 | 3′→5′ | 28770 | 28789 |
| 5302 | CGTAGAAGCCTTTTGGCAAT | NC_045512.2 | 3′→5′ | 28771 | 28790 |
| 5303 | GCGTAGAAGCCTTTTGGCAA | NC_045512.2 | 3′→5′ | 28772 | 28791 |
| 5304 | TGCGTAGAAGCCTTTTGGCA | NC_045512.2 | 3′→5′ | 28773 | 28792 |
| 5305 | CTGCGTAGAAGCCTTTTGGC | NC_045512.2 | 3′→5′ | 28774 | 28793 |
| 5306 | TCTGCGTAGAAGCCTTTTGG | NC_045512.2 | 3′→5′ | 28775 | 28794 |
| 5307 | GCTTGACTGCCGCCTCTGCT | NC_045512.2 | 3′→5′ | 28799 | 28818 |
| 5308 | GGCTTGACTGCCGCCTCTGC | NC_045512.2 | 3′→5′ | 28800 | 28819 |
| 5309 | AGGCTTGACTGCCGCCTCTG | NC_045512.2 | 3′→5′ | 28801 | 28820 |
| 5310 | GAGGCTTGACTGCCGCCTCT | NC_045512.2 | 3′→5′ | 28802 | 28821 |
| 5311 | AGAGGCTTGACTGCCGCCTC | NC_045512.2 | 3′→5′ | 28803 | 28822 |
| 5312 | AAGAGGCTTGACTGCCGCCT | NC_045512.2 | 3′→5′ | 28804 | 28823 |
| 5313 | GAAGAGGCTTGACTGCCGCC | NC_045512.2 | 3′→5′ | 28805 | 28824 |
| 5314 | AGAAGAGGCTTGACTGCCGC | NC_045512.2 | 3′→5′ | 28806 | 28825 |
| 5315 | GAGAAGAGGCTTGACTGCCG | NC_045512.2 | 3′→5′ | 28807 | 28826 |
| 5316 | CGAGAAGAGGCTTGACTGCC | NC_045512.2 | 3′→5′ | 28808 | 28827 |
| 5317 | TCAAGCTGGTTCAATCTGTC | NC_045512.2 | 3′→5′ | 28946 | 28965 |
| 5318 | CTCAAGCTGGTTCAATCTGT | NC_045512.2 | 3′→5′ | 28947 | 28966 |
| 5319 | TCTCAAGCTGGTTCAATCTG | NC_045512.2 | 3′→5′ | 28948 | 28967 |
| 5320 | CTCTCAAGCTGGTTCAATCT | NC_045512.2 | 3′→5′ | 28949 | 28968 |
| 5321 | GCTCTCAAGCTGGTTCAATC | NC_045512.2 | 3′→5′ | 28950 | 28969 |
| 5322 | TGCTCTCAAGCTGGTTCAAT | NC_045512.2 | 3′→5′ | 28951 | 28970 |
| 5323 | TTGCTCTCAAGCTGGTTCAA | NC_045512.2 | 3′→5′ | 28952 | 28971 |
| 5324 | TTTGCTCTCAAGCTGGTTCA | NC_045512.2 | 3′→5′ | 28953 | 28972 |
| 5325 | TGTTGTTGGCCTTTACCAGA | NC_045512.2 | 3′→5′ | 28976 | 28995 |
| 5326 | TTGTTGTTGGCCTTTACCAG | NC_045512.2 | 3′→5′ | 28977 | 28996 |
| 5327 | GTTGTTGTTGGCCTTTACCA | NC_045512.2 | 3′→5′ | 28978 | 28997 |
| 5328 | TGTTGTTGTTGGCCTTTACC | NC_045512.2 | 3′→5′ | 28979 | 28998 |
| 5329 | TTGTTGTTGTTGGCCTTTAC | NC_045512.2 | 3′→5′ | 28980 | 28999 |
| 5330 | CTTGTTGTTGTTGGCCTTTA | NC_045512.2 | 3′→5′ | 28981 | 29000 |
| 5331 | CCTTGTTGTTGTTGGCCTTT | NC_045512.2 | 3′→5′ | 28982 | 29001 |
| 5332 | GCCTTGTTGTTGTTGGCCTT | NC_045512.2 | 3′→5′ | 28983 | 29002 |
| 5333 | GGCCTTGTTGTTGTTGGCCT | NC_045512.2 | 3′→5′ | 28984 | 29003 |
| 5334 | TGGCCTTGTTGTTGTTGGCC | NC_045512.2 | 3′→5′ | 28985 | 29004 |
| 5335 | TTGGCCTTGTTGTTGTTGGC | NC_045512.2 | 3′→5′ | 28986 | 29005 |
| 5336 | TTTGGCCTTGTTGTTGTTGG | NC_045512.2 | 3′→5′ | 28987 | 29006 |
| 5337 | GTTTGGCCTTGTTGTTGTTG | NC_045512.2 | 3′→5′ | 28988 | 29007 |
| 5338 | AGTTTGGCCTTGTTGTTGTT | NC_045512.2 | 3′→5′ | 28989 | 29008 |
| 5339 | CAGTTTGGCCTTGTTGTTGT | NC_045512.2 | 3′→5′ | 28990 | 29009 |
| 5340 | ACAGTTTGGCCTTGTTGTTG | NC_045512.2 | 3′→5′ | 28991 | 29010 |
| 5341 | GACAGTTTGGCCTTGTTGTT | NC_045512.2 | 3′→5′ | 28992 | 29011 |
| 5342 | TGACAGTTTGGCCTTGTTGT | NC_045512.2 | 3′→5′ | 28993 | 29012 |
| 5343 | GTGACAGTTTGGCCTTGTTG | NC_045512.2 | 3′→5′ | 28994 | 29013 |
| 5344 | AGTGACAGTTTGGCCTTGTT | NC_045512.2 | 3′→5′ | 28995 | 29014 |
| 5345 | TAGTGACAGTTTGGCCTTGT | NC_045512.2 | 3′→5′ | 28996 | 29015 |
| 5346 | TTAGTGACAGTTTGGCCTTG | NC_045512.2 | 3′→5′ | 28997 | 29016 |
| 5347 | CTTAGTGACAGTTTGGCCTT | NC_045512.2 | 3′→5′ | 28998 | 29017 |
| 5348 | TCTTAGTGACAGTTTGGCCT | NC_045512.2 | 3′→5′ | 28999 | 29018 |
| 5349 | TTCTTAGTGACAGTTTGGCC | NC_045512.2 | 3′→5′ | 29000 | 29019 |
| 5350 | TTTCTTAGTGACAGTTTGGC | NC_045512.2 | 3′→5′ | 29001 | 29020 |
| 5351 | ATTTCTTAGTGACAGTTTGG | NC_045512.2 | 3′→5′ | 29002 | 29021 |
| 5352 | GATTTCTTAGTGACAGTTTG | NC_045512.2 | 3′→5′ | 29003 | 29022 |
| 5353 | AGATTTCTTAGTGACAGTTT | NC_045512.2 | 3′→5′ | 29004 | 29023 |
| 5354 | CAGATTTCTTAGTGACAGTT | NC_045512.2 | 3′→5′ | 29005 | 29024 |
| 5355 | GCAGATTTCTTAGTGACAGT | NC_045512.2 | 3′→5′ | 29006 | 29025 |
| 5356 | AGCAGATTTCTTAGTGACAG | NC_045512.2 | 3′→5′ | 29007 | 29026 |
| 5357 | CAGCAGATTTCTTAGTGACA | NC_045512.2 | 3′→5′ | 29008 | 29027 |
| 5358 | GCAGCAGATTTCTTAGTGAC | NC_045512.2 | 3′→5′ | 29009 | 29028 |
| 5359 | AGCAGCAGATTTCTTAGTGA | NC_045512.2 | 3′→5′ | 29010 | 29029 |
| 5360 | CAGCAGCAGATTTCTTAGTG | NC_045512.2 | 3′→5′ | 29011 | 29030 |
| 5361 | TCAGCAGCAGATTTCTTAGT | NC_045512.2 | 3′→5′ | 29012 | 29031 |
| 5362 | CTCAGCAGCAGATTTCTTAG | NC_045512.2 | 3′→5′ | 29013 | 29032 |
| 5363 | CCTCAGCAGCAGATTTCTTA | NC_045512.2 | 3′→5′ | 29014 | 29033 |
| 5364 | GCCTCAGCAGCAGATTTCTT | NC_045512.2 | 3′→5′ | 29015 | 29034 |
| 5365 | TCAGTTCCTTGTCTGATTAG | NC_045512.2 | 3′→5′ | 29144 | 29163 |
| 5366 | ATCAGTTCCTTGTCTGATTA | NC_045512.2 | 3′→5′ | 29145 | 29164 |
| 5367 | AATCAGTTCCTTGTCTGATT | NC_045512.2 | 3′→5′ | 29146 | 29165 |
| 5368 | TAATCAGTTCCTTGTCTGAT | NC_045512.2 | 3′→5′ | 29147 | 29166 |
| 5369 | GTAATCAGTTCCTTGTCTGA | NC_045512.2 | 3′→5′ | 29148 | 29167 |
| 5370 | TGTAATCAGTTCCTTGTCTG | NC_045512.2 | 3′→5′ | 29149 | 29168 |
| 5371 | TTGTAATCAGTTCCTTGTCT | NC_045512.2 | 3′→5′ | 29150 | 29169 |
| 5372 | TTTGTAATCAGTTCCTTGTC | NC_045512.2 | 3′→5′ | 29151 | 29170 |
| 5373 | GTTTGTAATCAGTTCCTTGT | NC_045512.2 | 3′→5′ | 29152 | 29171 |
| 5374 | TGTTTGTAATCAGTTCCTTG | NC_045512.2 | 3′→5′ | 29153 | 29172 |
| 5375 | AATTGTGCAATTTGCGGCCA | NC_045512.2 | 3′→5′ | 29174 | 29193 |
| 5376 | AAATTGTGCAATTTGCGGCC | NC_045512.2 | 3′→5′ | 29175 | 29194 |
| 5377 | CAAATTGTGCAATTTGCGGC | NC_045512.2 | 3′→5′ | 29176 | 29195 |
| 5378 | GCAAATTGTGCAATTTGCGG | NC_045512.2 | 3′→5′ | 29177 | 29196 |
| 5379 | GTGACTTCCATGCCAATGCG | NC_045512.2 | 3′→5′ | 29228 | 29247 |
| 5380 | TGTGACTTCCATGCCAATGC | NC_045512.2 | 3′→5′ | 29229 | 29248 |
| 5381 | GTGTGACTTCCATGCCAATG | NC_045512.2 | 3′→5′ | 29230 | 29249 |
| 5382 | GGTGTGACTTCCATGCCAAT | NC_045512.2 | 3′→5′ | 29231 | 29250 |
| 5383 | AGGTGTGACTTCCATGCCAA | NC_045512.2 | 3′→5′ | 29232 | 29251 |
| 5384 | AAGGTGTGACTTCCATGCCA | NC_045512.2 | 3′→5′ | 29233 | 29252 |
| 5385 | GAAGGTGTGACTTCCATGCC | NC_045512.2 | 3′→5′ | 29234 | 29253 |
| 5386 | CGAAGGTGTGACTTCCATGC | NC_045512.2 | 3′→5′ | 29235 | 29254 |
| 5387 | CCGAAGGTGTGACTTCCATG | NC_045512.2 | 3′→5′ | 29236 | 29255 |
| 5388 | CCCGAAGGTGTGACTTCCAT | NC_045512.2 | 3′→5′ | 29237 | 29256 |
| 5389 | TCCCGAAGGTGTGACTTCCA | NC_045512.2 | 3′→5′ | 29238 | 29257 |
| 5390 | TTCCCGAAGGTGTGACTTCC | NC_045512.2 | 3′→5′ | 29239 | 29258 |
| 5391 | GTTCCCGAAGGTGTGACTTC | NC_045512.2 | 3′→5′ | 29240 | 29259 |
| 5392 | GGATCTTTGTCATCCAATTT | NC_045512.2 | 3′→5′ | 29285 | 29304 |
| 5393 | TGGATCTTTGTCATCCAATT | NC_045512.2 | 3′→5′ | 29286 | 29305 |
| 5394 | AATGTTTTGTATGCGTCAAT | NC_045512.2 | 3′→5′ | 29342 | 29361 |
| 5395 | GAATGTTTTGTATGCGTCAA | NC_045512.2 | 3′→5′ | 29343 | 29362 |
| 5396 | GGAATGTTTTGTATGCGTCA | NC_045512.2 | 3′→5′ | 29344 | 29363 |
| 5397 | GGGAATGTTTTGTATGCGTC | NC_045512.2 | 3′→5′ | 29345 | 29364 |
| 5398 | TGGGAATGTTTTGTATGCGT | NC_045512.2 | 3′→5′ | 29346 | 29365 |
| 5399 | GTGGGAATGTTTTGTATGCG | NC_045512.2 | 3′→5′ | 29347 | 29366 |
| 5400 | GGTGGGAATGTTTTGTATGC | NC_045512.2 | 3′→5′ | 29348 | 29367 |
| 5401 | TGGTGGGAATGTTTTGTATG | NC_045512.2 | 3′→5′ | 29349 | 29368 |
| 5402 | TTGGTGGGAATGTTTTGTAT | NC_045512.2 | 3′→5′ | 29350 | 29369 |
| 5403 | GTTGGTGGGAATGTTTTGTA | NC_045512.2 | 3′→5′ | 29351 | 29370 |
| 5404 | TGTTGGTGGGAATGTTTTGT | NC_045512.2 | 3′→5′ | 29352 | 29371 |
| 5405 | CTGTTGGTGGGAATGTTTTG | NC_045512.2 | 3′→5′ | 29353 | 29372 |
| 5406 | TCTGTTGGTGGGAATGTTTT | NC_045512.2 | 3′→5′ | 29354 | 29373 |
| 5407 | CTCTGTTGGTGGGAATGTTT | NC_045512.2 | 3′→5′ | 29355 | 29374 |
| 5408 | GCTCTGTTGGTGGGAATGTT | NC_045512.2 | 3′→5′ | 29356 | 29375 |
| 5409 | GGCTCTGTTGGTGGGAATGT | NC_045512.2 | 3′→5′ | 29357 | 29376 |
| 5410 | AGGCTCTGTTGGTGGGAATG | NC_045512.2 | 3′→5′ | 29358 | 29377 |
| 5411 | TAGGCTCTGTTGGTGGGAAT | NC_045512.2 | 3′→5′ | 29359 | 29378 |
| 5412 | TTAGGCTCTGTTGGTGGGAA | NC_045512.2 | 3′→5′ | 29360 | 29379 |
| 5413 | TTTAGGCTCTGTTGGTGGGA | NC_045512.2 | 3′→5′ | 29361 | 29380 |
| 5414 | TTTTAGGCTCTGTTGGTGGG | NC_045512.2 | 3′→5′ | 29362 | 29381 |
| 5415 | TTTTTAGGCTCTGTTGGTGG | NC_045512.2 | 3′→5′ | 29363 | 29382 |
| 5416 | CTTTTTAGGCTCTGTTGGTG | NC_045512.2 | 3′→5′ | 29364 | 29383 |
| 5417 | CCTTTTTAGGCTCTGTTGGT | NC_045512.2 | 3′→5′ | 29365 | 29384 |
| 5418 | TCCTTTTTAGGCTCTGTTGG | NC_045512.2 | 3′→5′ | 29366 | 29385 |
| 5419 | GTCCTTTTTAGGCTCTGTTG | NC_045512.2 | 3′→5′ | 29367 | 29386 |
| 5420 | TGTCCTTTTTAGGCTCTGTT | NC_045512.2 | 3′→5′ | 29368 | 29387 |
| 5421 | TTGTCCTTTTTAGGCTCTGT | NC_045512.2 | 3′→5′ | 29369 | 29388 |
| 5422 | TTTGTCCTTTTTAGGCTCTG | NC_045512.2 | 3′→5′ | 29370 | 29389 |
| 5423 | TTTTGTCCTTTTTAGGCTCT | NC_045512.2 | 3′→5′ | 29371 | 29390 |
| 5424 | TTTTTGTCCTTTTTAGGCTC | NC_045512.2 | 3′→5′ | 29372 | 29391 |
| 5425 | CTTTTTGTCCTTTTTAGGCT | NC_045512.2 | 3′→5′ | 29373 | 29392 |
| 5426 | TCTTTTTGTCCTTTTTAGGC | NC_045512.2 | 3′→5′ | 29374 | 29393 |
| 5427 | TTCTTTTTGTCCTTTTTAGG | NC_045512.2 | 3′→5′ | 29375 | 29394 |
| 5428 | GCAGGAAGAAGAGTCACAGT | NC_045512.2 | 3′→5′ | 29444 | 29463 |
| 5429 | CCCATCTGCCTTGTGTGGTC | NC_045512.2 | 3′→5′ | 29543 | 29562 |
| 5430 | GCCCATCTGCCTTGTGTGGT | NC_045512.2 | 3′→5′ | 29544 | 29563 |
| 5431 | AGCCCATCTGCCTTGTGTGG | NC_045512.2 | 3′→5′ | 29545 | 29564 |
| 5432 | TAGCCCATCTGCCTTGTGTG | NC_045512.2 | 3′→5′ | 29546 | 29565 |
| 5433 | ATAGCCCATCTGCCTTGTGT | NC_045512.2 | 3′→5′ | 29547 | 29566 |
| 5434 | TCTGCACAAGAGTAGACTAT | NC_045512.2 | 3′→5′ | 29598 | 29617 |
| 5435 | TTCTGCACAAGAGTAGACTA | NC_045512.2 | 3′→5′ | 29599 | 29618 |
| 5436 | ATTCTGCACAAGAGTAGACT | NC_045512.2 | 3′→5′ | 29600 | 29619 |
| 5437 | CATTCTGCACAAGAGTAGAC | NC_045512.2 | 3′→5′ | 29601 | 29620 |
| 5438 | TCATTCTGCACAAGAGTAGA | NC_045512.2 | 3′→5′ | 29602 | 29621 |
| 5439 | TTCATTCTGCACAAGAGTAG | NC_045512.2 | 3′→5′ | 29603 | 29622 |
| 5440 | ATTCATTCTGCACAAGAGTA | NC_045512.2 | 3′→5′ | 29604 | 29623 |
| 5441 | AATTCATTCTGCACAAGAGT | NC_045512.2 | 3′→5′ | 29605 | 29624 |
| 5442 | GAATTCATTCTGCACAAGAG | NC_045512.2 | 3′→5′ | 29606 | 29625 |
| 5443 | AGAATTCATTCTGCACAAGA | NC_045512.2 | 3′→5′ | 29607 | 29626 |
| 5444 | GAGAATTCATTCTGCACAAG | NC_045512.2 | 3′→5′ | 29608 | 29627 |
| 5445 | CGAGAATTCATTCTGCACAA | NC_045512.2 | 3′→5′ | 29609 | 29628 |
| 5446 | ACGAGAATTCATTCTGCACA | NC_045512.2 | 3′→5′ | 29610 | 29629 |
| 5447 | TACGAGAATTCATTCTGCAC | NC_045512.2 | 3′→5′ | 29611 | 29630 |
| 5448 | TGTGAGATTAAAGTTAACTA | NC_045512.2 | 3′→5′ | 29652 | 29671 |
| 5449 | ATGTGAGATTAAAGTTAACT | NC_045512.2 | 3′→5′ | 29653 | 29672 |
| 5450 | TATGTGAGATTAAAGTTAAC | NC_045512.2 | 3′→5′ | 29654 | 29673 |
| 5451 | CTATGTGAGATTAAAGTTAA | NC_045512.2 | 3′→5′ | 29655 | 29674 |
| 5452 | GCTATGTGAGATTAAAGTTA | NC_045512.2 | 3′→5′ | 29656 | 29675 |
| 5453 | TGCTATGTGAGATTAAAGTT | NC_045512.2 | 3′→5′ | 29657 | 29676 |
| 5454 | TTGCTATGTGAGATTAAAGT | NC_045512.2 | 3′→5′ | 29658 | 29677 |
| 5455 | ATTGCTATGTGAGATTAAAG | NC_045512.2 | 3′→5′ | 29659 | 29678 |
| 5456 | GATTGCTATGTGAGATTAAA | NC_045512.2 | 3′→5′ | 29660 | 29679 |
| 5457 | AGATTGCTATGTGAGATTAA | NC_045512.2 | 3′→5′ | 29661 | 29680 |
| 5458 | AAGATTGCTATGTGAGATTA | NC_045512.2 | 3′→5′ | 29662 | 29681 |
| 5459 | AAAGATTGCTATGTGAGATT | NC_045512.2 | 3′→5′ | 29663 | 29682 |
| 5460 | TAAAGATTGCTATGTGAGAT | NC_045512.2 | 3′→5′ | 29664 | 29683 |
| 5461 | TTAAAGATTGCTATGTGAGA | NC_045512.2 | 3′→5′ | 29665 | 29684 |
| 5462 | ATTAAAGATTGCTATGTGAG | NC_045512.2 | 3′→5′ | 29666 | 29685 |
| 5463 | GATTAAAGATTGCTATGTGA | NC_045512.2 | 3′→5′ | 29667 | 29686 |
| 5464 | TGATTAAAGATTGCTATGTG | NC_045512.2 | 3′→5′ | 29668 | 29687 |
| 5465 | GTCCTCCCTAATGTTACACA | NC_045512.2 | 3′→5′ | 29689 | 29708 |
| 5466 | AGTCCTCCCTAATGTTACAC | NC_045512.2 | 3′→5′ | 29690 | 29709 |
| 5467 | AAGTCCTCCCTAATGTTACA | NC_045512.2 | 3′→5′ | 29691 | 29710 |
| 5468 | CAAGTCCTCCCTAATGTTAC | NC_045512.2 | 3′→5′ | 29692 | 29711 |
| 5469 | TCAAGTCCTCCCTAATGTTA | NC_045512.2 | 3′→5′ | 29693 | 29712 |
| 5470 | TTCAAGTCCTCCCTAATGTT | NC_045512.2 | 3′→5′ | 29694 | 29713 |
| 5471 | TTTCAAGTCCTCCCTAATGT | NC_045512.2 | 3′→5′ | 29695 | 29714 |
| 5472 | CTTTCAAGTCCTCCCTAATG | NC_045512.2 | 3′→5′ | 29696 | 29715 |
| 5473 | TCTTTCAAGTCCTCCCTAAT | NC_045512.2 | 3′→5′ | 29697 | 29716 |
| 5474 | CTCTTTCAAGTCCTCCCTAA | NC_045512.2 | 3′→5′ | 29698 | 29717 |
| 5475 | GCTCTTTCAAGTCCTCCCTA | NC_045512.2 | 3′→5′ | 29699 | 29718 |
| 5476 | GGCTCTTTCAAGTCCTCCCT | NC_045512.2 | 3′→5′ | 29700 | 29719 |
| 5477 | TGGCTCTTTCAAGTCCTCCC | NC_045512.2 | 3′→5′ | 29701 | 29720 |
| 5478 | GTGGCTCTTTCAAGTCCTCC | NC_045512.2 | 3′→5′ | 29702 | 29721 |
| 5479 | GGTGGCTCTTTCAAGTCCTC | NC_045512.2 | 3′→5′ | 29703 | 29722 |
| 5480 | TGGTGGCTCTTTCAAGTCCT | NC_045512.2 | 3′→5′ | 29704 | 29723 |
| 5481 | GTGGTGGCTCTTTCAAGTCC | NC_045512.2 | 3′→5′ | 29705 | 29724 |
| 5482 | TGTGGTGGCTCTTTCAAGTC | NC_045512.2 | 3′→5′ | 29706 | 29725 |
| 5483 | ATGTGGTGGCTCTTTCAAGT | NC_045512.2 | 3′→5′ | 29707 | 29726 |
| 5484 | AATGTGGTGGCTCTTTCAAG | NC_045512.2 | 3′→5′ | 29708 | 29727 |
| 5485 | AAATGTGGTGGCTCTTTCAA | NC_045512.2 | 3′→5′ | 29709 | 29728 |
| 5486 | AAAATGTGGTGGCTCTTTCA | NC_045512.2 | 3′→5′ | 29710 | 29729 |
| 5487 | GAAAATGTGGTGGCTCTTTC | NC_045512.2 | 3′→5′ | 29711 | 29730 |
| 5488 | TGAAAATGTGGTGGCTCTTT | NC_045512.2 | 3′→5′ | 29712 | 29731 |
| 5489 | TCGTACTCCGCGTGGCCTCG | NC_045512.2 | 3′→5′ | 29733 | 29752 |
| 5490 | ATCGTACTCCGCGTGGCCTC | NC_045512.2 | 3′→5′ | 29734 | 29753 |
| 5491 | GATCGTACTCCGCGTGGCCT | NC_045512.2 | 3′→5′ | 29735 | 29754 |
| 5492 | CGATCGTACTCCGCGTGGCC | NC_045512.2 | 3′→5′ | 29736 | 29755 |
| 5493 | TCGATCGTACTCCGCGTGGC | NC_045512.2 | 3′→5′ | 29737 | 29756 |
| 5494 | CTCGATCGTACTCCGCGTGG | NC_045512.2 | 3′→5′ | 29738 | 29757 |
| 5495 | AGGCAGCTCTCCCTAGCATT | NC_045512.2 | 3′→5′ | 29770 | 29789 |
| 5496 | TAGGCAGCTCTCCCTAGCAT | NC_045512.2 | 3′→5′ | 29771 | 29790 |
| 5497 | ATAGGCAGCTCTCCCTAGCA | NC_045512.2 | 3′→5′ | 29772 | 29791 |
| 5498 | TATAGGCAGCTCTCCCTAGC | NC_045512.2 | 3′→5′ | 29773 | 29792 |
| 5499 | ATATAGGCAGCTCTCCCTAG | NC_045512.2 | 3′→5′ | 29774 | 29793 |
| 5500 | CATATAGGCAGCTCTCCCTA | NC_045512.2 | 3′→5′ | 29775 | 29794 |
| 5501 | CCATATAGGCAGCTCTCCCT | NC_045512.2 | 3′→5′ | 29776 | 29795 |
| 5502 | TCCATATAGGCAGCTCTCCC | NC_045512.2 | 3′→5′ | 29777 | 29796 |
| 5503 | TTCCATATAGGCAGCTCTCC | NC_045512.2 | 3′→5′ | 29778 | 29797 |
| 5504 | CTTCCATATAGGCAGCTCTC | NC_045512.2 | 3′→5′ | 29779 | 29798 |
| 5505 | TCTTCCATATAGGCAGCTCT | NC_045512.2 | 3′→5′ | 29780 | 29799 |
| 5506 | CTCTTCCATATAGGCAGCTC | NC_045512.2 | 3′→5′ | 29781 | 29800 |
| 5507 | GCTCTTCCATATAGGCAGCT | NC_045512.2 | 3′→5′ | 29782 | 29801 |
| 5508 | GGCTCTTCCATATAGGCAGC | NC_045512.2 | 3′→5′ | 29783 | 29802 |
| 5509 | GGGCTCTTCCATATAGGCAG | NC_045512.2 | 3′→5′ | 29784 | 29803 |
| 5510 | AGGGCTCTTCCATATAGGCA | NC_045512.2 | 3′→5′ | 29785 | 29804 |
| 5511 | TAGGGCTCTTCCATATAGGC | NC_045512.2 | 3′→5′ | 29786 | 29805 |
| 5512 | TTAGGGCTCTTCCATATAGG | NC_045512.2 | 3′→5′ | 29787 | 29806 |
| 5513 | ATTAGGGCTCTTCCATATAG | NC_045512.2 | 3′→5′ | 29788 | 29807 |
| 5514 | CATTAGGGCTCTTCCATATA | NC_045512.2 | 3′→5′ | 29789 | 29808 |
| 5515 | ACATTAGGGCTCTTCCATAT | NC_045512.2 | 3′→5′ | 29790 | 29809 |
| 5516 | CACATTAGGGCTCTTCCATA | NC_045512.2 | 3′→5′ | 29791 | 29810 |
| 5517 | ACACATTAGGGCTCTTCCAT | NC_045512.2 | 3′→5′ | 29792 | 29811 |
| 5518 | TACACATTAGGGCTCTTCCA | NC_045512.2 | 3′→5′ | 29793 | 29812 |
| 5519 | TTACACATTAGGGCTCTTCC | NC_045512.2 | 3′→5′ | 29794 | 29813 |
| 5520 | TTTACACATTAGGGCTCTTC | NC_045512.2 | 3′→5′ | 29795 | 29814 |
| 5521 | TTTTACACATTAGGGCTCTT | NC_045512.2 | 3′→5′ | 29796 | 29815 |
| 5522 | ATTTTACACATTAGGGCTCT | NC_045512.2 | 3′→5′ | 29797 | 29816 |
| 5523 | AATTTTACACATTAGGGCTC | NC_045512.2 | 3′→5′ | 29798 | 29817 |
| 5524 | TAATTTTACACATTAGGGCT | NC_045512.2 | 3′→5′ | 29799 | 29818 |
| 5525 | TTAATTTTACACATTAGGGC | NC_045512.2 | 3′→5′ | 29800 | 29819 |
| 5526 | ATTAATTTTACACATTAGGG | NC_045512.2 | 3′→5′ | 29801 | 29820 |
| 5527 | AATTAATTTTACACATTAGG | NC_045512.2 | 3′→5′ | 29802 | 29821 |
| 5528 | AAATTAATTTTACACATTAG | NC_045512.2 | 3′→5′ | 29803 | 29822 |
| 5529 | AAAATTAATTTTACACATTA | NC_045512.2 | 3′→5′ | 29804 | 29823 |
| 5530 | TAAAATTAATTTTACACATT | NC_045512.2 | 3′→5′ | 29805 | 29824 |
| 5531 | CTAAAATTAATTTTACACAT | NC_045512.2 | 3′→5′ | 29806 | 29825 |
| 5532 | ACTAAAATTAATTTTACACA | NC_045512.2 | 3′→5′ | 29807 | 29826 |
| 5533 | TACTAAAATTAATTTTACAC | NC_045512.2 | 3′→5′ | 29808 | 29827 |
| 5534 | CTACTAAAATTAATTTTACA | NC_045512.2 | 3′→5′ | 29809 | 29828 |

[0114] For the purposes of the present disclosure, it is to be understood that Table 1 discloses not only SEQ ID NOs: 1-5534, but also the complements thereof. In some embodiments, the complements of any one of SEQ ID NOs: 1-5534 may be utilized for preparing a coronavirus-specific ASO. In some embodiments, the ASOs of the disclosure have a sequence that differs from an ASO of Table 1 by one nucleoside. In other embodiments, the ASO has a sequence that differs from an ASO of Table 1 by 1, 2, 3 or 4 nucleosides. In some embodiments, the nucleotide sequence is at least 90% identical to a nucleotide sequence selected from Table 1 In some embodiments, the ASOs of the disclosure have a sequence of Table 1, but one T in the central region is replaced by (2s)T, one C in the central region is replaced by (5OH)C, and/or one A is replaced by (8NH)A in the central region. In some embodiments, the ASOs of the disclosure have a sequence of Table 1, but with one or two ScpBNA, AmNA, or GuNA in the 5′ wing portion. In some embodiments, the ASOs of the disclosure have a sequence of Table 1, but with one or two ScpBNA, AmNA, or GuNA in the 3′ wing portion. In some embodiments, the ASOs of the disclosure have a sequence of Table 1, but with a mA or mU appended to the 5′ end of the sequence.

[0115] The list of ASO sequences provided in Table 1 is not intended to be limiting, and a skilled artisan will understand that other similar ASO may be derived from other coronaviruses or from other portions of GenBank Accession NC_045512.2. For example, in some embodiments, an ASO may possess about 80%, about 81%, about 82%, about 83%, about 84%, about 85%, about 86%, about 87%, about 88%, about 89%, about 90%, about 91%, about 92%, about 93%, about 94%, about 95%, about 96%, about 97%, about 98%, about 99%, or about 100% homology or identity to any of the sequences disclosed in Table 1.

[0116] In some embodiments, the compounds of the disclosure have a sequence that differs from an ASO sequences disclosed in Table 1 by one nucleoside. In other embodiments, the ASO has a sequence that differs from an ASO of Table 1 by 1, 2, 3, or 4 nucleosides. In some embodiments, the nucleotide sequence is at least 90% identical to a nucleotide sequence selected from Table 1. In some embodiments, the compounds of the disclosure have a sequence of Table 1, but one T in the central region is replaced by (2s)T, one C in the central region is replaced by (5OH)C, and/or one A is replaced by (8NH)A in the central region. In some embodiments, the compounds of the disclosure have a sequence of Table 1, but with one or two ScpBNA, AmNA, or GuNA in the 5′ wing portion. In some embodiments, the compounds of the disclosure have a sequence of Table 1, but with one or two ScpBNA, AmNA, or GuNA in the 3′ wing portion. In some embodiments, the compounds of the disclosure have a sequence of Table 1, but with one or two or more LNA in the 5′ wing portion. In some embodiments, the compounds of the disclosure have a sequence of Table 1, but with one or two or more LNA in the 3′ wing portion. In some embodiments, the compounds of the disclosure have a sequence of Table 1, but with a mA or mU appended to the 5′ end of the sequence. In some embodiments, the compounds of the disclosure have a sequence of Table 1, but with a mA or mU appended to the 5′ end of the sequence that links to a conjugation moiety (i.e., a targeting moiety). In some embodiments, the compounds of the disclosure have a sequence of Table 1, but with a mA or mU appended to the 3′ end of the sequence. In some embodiments, the compounds of the disclosure have a sequence of Table 1, but with a mA or mU appended to the 3′ end of the sequence that links to a conjugation moiety (i.e., a targeting moiety).

[0117] In some embodiments, the sequence of an ASO may comprise 8, 9, 10, 11, 12, 13, 14, 15, or 16 or more consecutive nucleotides of any one of the coronavirus genomes shown in Table 2 at the end of the Detailed Description Section or a sequence possessing about 80%, about 81%, about 82%, about 83%, about 84%, about 85%, about 86%, about 87%, about 88%, about 89%, about 90%, about 91%, about 92%, about 93%, about 94%, about 95%, about 96%, about 97%, about 98%, about 99%, or about 100% homology or identity with a sequence comprising, 9, 10, 11, 12, 13, 14, 15, or 16 or more consecutive nucleotides of any one of the coronavirus genomes shown in Table 2. In the foregoing embodiments, the ASO sequence may comprise one or more modified, locked, conjugated, or linked nucleotides/nucleosides in addition to or in place of any of the 8, 9, 10, 11, 12, 13, 14, 15, or 16 or more consecutive nucleotides of any one of the coronavirus genomes shown in Table 2 or homologs thereof.

[0118] In some embodiments, the disclosed ASO molecules comprise one or more modified nucleotides. In some embodiments, any of the ASO molecules disclosed herein comprise 1, 2, 3, 4, 5, 6, 7, 8, 9, 10, 11, 12, 13, 14, 15, 16, 17, 18, 19, 20, 21, or 22. In some embodiments, 1%, 2%, 3%, 4%, 5%, 10%, 15%, 20%, 25%, 30%, 35%, 40%, 45%, 50%, 55%, 60%, 70%, 75%, 80%, 85%, 86%, 87%, 88%, 90%, 91%, 92%, 93%, 94%, 95%, 96%, 97%, 98%, 99% or 100% of the nucleotides in the ASO molecule are modified nucleotides.

[0119] In some embodiments, the disclosed ASO molecules comprise one or more locked nucleotides. In some embodiments, any of the ASO molecules disclosed herein comprise 1, 2, 3, 4, 5, 6, 7, 8, 9, 10, 11, 12, 13, 14, 15, 16, 17, 18, 19, 20, 21, or 22. In some embodiments, 1%, 2%, 3%, 4%, 5%, 10%, 15%, 20%, 25%, 30%, 35%, 40%, 45%, 50%, 55%, 60%, 70%, 75%, 80%, 85%, 86%, 87%, 88%, 90%, 91%, 92%, 93%, 94%, 95%, 96%, 97%, 98%, 99% or 100% of the nucleotides in the ASO molecule are locked nucleotides.

[0120] In some embodiments, the ASO is modified at one or more end by a vinyl phosphonate moiety, such as a 5′-vinyl phosphonate moiety.

### Conjugated or Targeting Moiety

[0121] The present disclosure is also directed to additional components conjugated to the ASO such as conjugated moieties (e.g., a targeting moieties) and oligonucleotides modified at one or more end.

[0122] In some embodiments, the disclosed ASO molecules comprise a conjugated moiety (i.e., a targeting moiety). The conjugated moiety may improve or alter the pharmacokinetics of the ASO and/or target the ASO to a particular cell or type of cell (e.g., lung cells). In some embodiments, the conjugated/targeting moiety may comprise a carbohydrate, such as a monosaccharide, disaccharide, trisaccharide, tetrasaccharide, oligosaccharide, and polysaccharide.

[0123] In some embodiments, the conjugated/targeting moiety is attached to the 3′ end of the ASO. In some embodiments, the conjugated/targeting moiety is attached to the 3′ end of the ASO via 1, 2, 3, 4, or 5 or more linkers. In some embodiments, the conjugated/targeting moiety is attached to the 5′ end of the ASO. In some embodiments, the conjugated/targeting moiety is attached to the 5′ end of the ASO via 1, 2, 3, 4, or 5 or more linkers. In some embodiments, the one or more linkers are independently selected from the group consisting of a phosphodiester linker, phosphorothioate linker, and phosphorodithioate linker.

[0124] In some embodiments, the ASO contains a conjugated/targeting moiety at the 5′-end, the 3′-end, or both ends of the ASO.

[0125] In some embodiments, the ASO is modified at one or more end by a vinyl phosphonate moiety, such as a 5′-vinyl phosphonate moiety.

### Specific Embodiments

[0126] The present disclosure provides numerous ASOs that can be used to treat or prevent viral infections, specifically coronavirus (e.g., SARS-CoV-2) infections, such as COVID-19. Table 3, below, provides a non-limiting list of ASOs that incorporate the various elements and sequences described in the preceding section. Those of skill in the art will understand that other exemplary ASOs can be constructed by combining the sequences disclosed in Table 1 (or fragments of the sequences disclosed in Table 2) with the elements, sequences, and designs described in the preceding section.

TABLE 3
Exemplary ASOs

| | SEQ ID | |
|---|---|---|
| Name | NO: | Sequence (5′ to 3′) |
| ASO- | 5539 | lnApslnTpsln(5m)CpslnAps(5m)Cps(2s)Tps(5m)CpsTpsTpsApsGpsGpsG |
| 000 | | pslnApslnApslnT |
| ASO- | 5540 | ln(5m)CpslnApslnTpsln(5m)CpsAps(5oh)CpsTps(5m)CpsTpsTpsApsGps |
| 001 | | GpslnGpslnApslnA |
| ASO- | 5541 | ln(5m)Cpsln(5m)CpslnApslnTps(5m)Cps(8nh)Aps(5m)CpsTps(5m)CpsT |
| 002 | | psTpsApsGpslnGpslnGpslnA |
| ASO- | 5542 | lnGpslnApsln(5m)CpslnGpsGps(8nh)Gps(5m)CpsTpsGps(5m)CpsAps |
| 003 | | (5m)CpsTpslnTpslnApsln(5m)C |
| ASO- | 5543 | lnTpslnGpsln(5m)CpslnAps(5m)Cps(2s)TpsApsApsTpsGpsGps(5m)CpsA |
| 004 | | pslnTpslnApsln(5m)C |
| ASO- | 5544 | lnTpslnGpsln(5m)CpslnGpsAps(8nh)Gps(5m)CpsTps(5m)CpsTpsApsTps |
| 005 | | Tpsln(5m)CpslnTpslnT |
| ASO- | 5545 | lnGpslnTpslnGpsln(5m)CpsGps(8nh)ApsGps(5m)CpsTps(5m)CpsTpsAps |
| 006 | | TpslnTpsln(5m)CpslnT |
| ASO- | 5546 | ln(5m)CpslnApslnTpslnApsGps(2s)TpsAps(5m)CpsTpsAps(5m)CpsApsG |
| 007 | | pslnApslnTpslnA |
| ASO- | 5547 | lnTpslnTpslnApslnGps(5m)Cps(8nh)ApsTpsApsApsGps(5m)CpsApsGpsl |
| 008 | | nTpslnTpslnG |
| ASO- | 5548 | lnApslnApsln(5m)CpslnApsTps(8nh)GpsTps(5m)CpsTpsGpsGpsAps(5m) |
| 009 | | Cpsln(5m)CpslnTpslnA |
| ASO- | 5549 | lnTpslnApslnTpsln(5m)CpsAps(8nh)GpsAps(5m)CpsApsTpsTpsApsTpsl |
| 010 | | nGpsln(5m)CpslnA |
| ASO- | 5550 | ln(5m)CpslnTpslnApslnTps(5m)Cps(8nh)ApsGpsAps(5m)CpsApsTpsTps |
| 011 | | ApslnTpslnGpsln(5m)C |
| ASO- | 5551 | lnTpsln(5m)CpslnTpslnApsTps(5oh)CpsApsGpsAps(5m)CpsApsTpsTpsl |
| 012 | | nApslnTpslnG |
| ASO- | 5552 | ln(5m)CpslnTpsln(5m)CpslnTpsAps(2s)Tps(5m)CpsApsGpsAps(5m)Cps |
| 013 | | ApsTpslnTpslnApslnT |
| ASO- | 5553 | ln(5m)CpslnTpslnApslnTpsTps(8nh)ApsAps(5m)CpsGpsTpsAps(5m)Cps |
| 014 | | (5m)CpslnTpslnGpslnT |
| ASO- | 5554 | lnGpslnTpslnApsln(5m)CpsGps(5oh)CpsAps(5m)CpsAps(5m)CpsApsAps |
| 015 | | Tpsln(5m)CpslnGpslnA |
| ASO- | 5555 | ln(5m)CpslnApslnGpslnTpsAps(5oh)CpsGps(5m)CpsAps(5m)CpsAps |
| 016 | | (5m)CpsApslnApslnTpsln(5m)C |
| ASO- | 5556 | lnGpsln(5m)Cpsln(5m)CpslnApsAps(2s)TpsTpsTpsGpsGpsTps(5m)CpsA |
| 017 | | pslnTpsln(5m)CpslnT |
| ASO- | 5557 | lnApslnApslnTpslnTpsGps(2s)TpsGps(5m)CpsApsApsTpsTpsTpslnGpsl |
| 018 | | n(5m)CpslnG |
| ASO- | 5558 | ln(5m)Cpsln(5m)CpslnApslnTpsAps(2s)TpsApsGpsGps(5m)CpsApsGps |
| 019 | | (5m)CpslnTpsln(5m)CpslnT |
| ASO- | 5559 | lnTpsln(5m)Cpsln(5m)CpslnApsTps(8nh)ApsTpsApsGpsGps(5m)CpsAps |
| 020 | | Gpsln(5m)CpslnTpsln(5m)C |
| ASO- | 5560 | lnTpslnTpslnApslnGpsGps(8nh)Gps(5m)CpsTps(5m)CpsTpsTps(5m)Cps |
| 021 | | (5m)CpslnApslnTpslnA |
| ASO- | 5561 | lnApslnTpsln(5m)CpsAps(5m)Cps(2s)Tps(5m)CpsTpsTpsApsGpsGpslnG |
| 022 | | pslnApslnApslnT |
| ASO- | 5562 | ln(5m)CpslnApslnTps(5m)CpsAps(5oh)CpsTps(5m)CpsTpsTpsApsGpsln |
| 023 | | GpslnGpslnApslnA |
| ASO- | 5563 | ln(5m)Cpsln(5m)CpslnApsTps(5m)Cps(8nh)Aps(5m)CpsTps(5m)CpsTps |
| 024 | | TpsApslnGpslnGpslnGpslnA |
| ASO- | 5564 | lnGpslnApsln(5m)CpsGpsGps(8nh)Gps(5m)CpsTpsGps(5m)CpsAps(5m)C |
| 025 | | pslnTpslnTpslnApsln(5m)C |
| ASO- | 5565 | lnTpslnGpsln(5m)CpsAps(5m)Cps(2s)TpsApsApsTpsGpsGps(5m)CpslnA |
| 026 | | pslnTpslnApsln(5m)C |
| ASO- | 5566 | lnTpslnGpsln(5m)CpsGpsAps(8nh)Gps(5m)CpsTps(5m)CpsTpsApsTpsln |
| 027 | | Tpsln(5m)CpslnTpslnT |
| ASO- | 5567 | lnGpslnTpslnGps(5m)CpsGps(8nh)ApsGps(5m)CpsTps(5m)CpsTpsApsln |
| 028 | | TpslnTpsln(5m)CpslnT |
| ASO- | 5568 | ln(5m)CpslnApslnTpsApsGps(2s)TpsAps(5m)CpsTpsAps(5m)CpsApslnG |
| 029 | | pslnApslnTpslnA |
| ASO- | 5569 | lnTpslnTpslnApsGps(5m)Cps(8nh)ApsTpsApsApsGps(5m)CpsApslnGps |
| 030 | | lnTpslnTpslnG |
| ASO- | 5570 | lnApslnApsln(5m)CpsApsTps(8nh)GpsTps(5m)CpsTpsGpsGpsApsln(5m) |
| 031 | | Cpsln(5m)CpslnTpslnA |
| ASO- | 5571 | lnTpslnApslnTps(5m)CpsAps(8nh)GpsAps(5m)CpsApsTpsTpsApslnTps |
| 032 | | lnGpsln(5m)CpslnA |
| ASO- | 5572 | ln(5m)CpslnTpslnApsTps(5m)Cps(8nh)ApsGpsAps(5m)CpsApsTpsTpsln |
| 033 | | ApslnTpslnGpsln(5m)C |
| ASO- | 5573 | lnTpsln(5m)CpslnTpsApsTps(5oh)CpsApsGpsAps(5m)CpsApsTpslnTps |
| 034 | | lnApslnTpslnG |
| ASO- | 5574 | ln(5m)CpslnTpsln(5m)CpsTpsAps(2s)Tps(5m)CpsApsGpsAps(5m)CpsA |
| 035 | | pslnTpslnTpslnApslnT |
| ASO- | 5575 | ln(5m)CpslnTpslnApsTpsTps(8nh)ApsAps(5m)CpsGpsTpsAps(5m)Cpsln |
| 036 | | (5m)CpslnTpslnGpslnT |
| ASO- | 5576 | lnGpslnTpslnAps(5m)CpsGps(5oh)CpsAps(5m)CpsAps(5m)CpsApsApsln |
| 037 | | Tpsln(5m)CpslnGpslnA |
| ASO- | 5577 | lnGpslnTpslnAps(5m)CpsGps(5oh)CpsAps(5m)CpsAps(5m)CpsApsApsln |
| 038 | | Tpsln(5m)CpslnGpslnA |
| ASO- | 5578 | ln(5m)CpslnApslnGpsTpsAps(5oh)CpsGps(5m)CpsAps(5m)CpsAps(5m)C |
| 039 | | pslnApslnApslnTpsln(5m)C |
| ASO- | 5579 | lnGpsln(5m)Cpsln(5m)CpsApsAps(2s)TpsTpsTpsGpsGpsTps(5m)CpslnA |
| 040 | | pslnTpsln(5m)CpslnT |
| ASO- | 5580 | lnApslnApslnTpsTpsGps(2s)TpsGps(5m)CpsApsApsTpsTpslnTpslnGps |
| 041 | | ln(5m)CpslnG |
| ASO- | 5581 | ln(5m)Cpsln(5m)CpslnApsTpsAps(2s)TpsApsGpsGps(5m)CpsApsGpsln |
| 042 | | (5m)CpslnTpsln(5m)CpslnT |
| ASO- | 5582 | lnTpsln(5m)Cpsln(5m)CpsApsTps(8nh)ApsTpsApsGpsGps(5m)CpsApsln |
| 043 | | Gpsln(5m)CpslnTpsln(5m)C |
| ASO- | 5583 | lnTpslnTpslnApsGpsGps(8nh)Gps(5m)CpsTps(5m)CpsTpsTps(5m)Cpsln |
| 044 | | (5m)CpslnApslnTpslnA |
| ASO- | 5584 | lnApslnTpsln(5m)CpslnAps(5m)CpsTps(5oh)CpsTpsTpsApsGpsGpsGps |
| 045 | | lnApslnApslnT |
| ASO- | 5585 | ln(5m)CpslnApslnTpsln(5m)CpsAps(5m)Cps(2s)Tps(5m)CpsTpsTpsAps |
| 046 | | GpsGpslnGpslnApslnA |
| ASO- | 5586 | ln(5m)Cpsln(5m)CpslnApslnTps(5m)CpsAps(5oh)CpsTps(5m)CpsTpsT |
| 047 | | psApsGpslnGpslnGpslnA |
| ASO- | 5587 | lnGpslnApsln(5m)CpslnGpsGpsGps(5oh)CpsTpsGps(5m)CpsAps(5m)Cps |
| 048 | | TpslnTpslnApsln(5m)C |
| ASO- | 5588 | lnTpslnGpsln(5m)CpslnAps(5m)CpsTps(8nh)ApsApsTpsGpsGps(5m)Cps |
| 049 | | ApslnTpslnApsln(5m)C |
| ASO- | 5589 | lnTpslnGpsln(5m)CpslnGpsApsGps(5oh)CpsTps(5m)CpsTpsApsTpsTps |
| 050 | | ln(5m)CpslnTpslnT |
| ASO- | 5590 | lnGpslnTpslnGpsln(5m)CpsGpsAps(8nh)Gps(5m)CpsTps(5m)CpsTpsAps |
| 051 | | TpslnTpsln(5m)CpslnT |
| ASO- | 5591 | ln(5m)CpslnApslnTpslnApsGpsTps(8nh)Aps(5m)CpsTpsAps(5m)CpsAps |
| 052 | | GpslnApslnTpslnA |
| ASO- | 5592 | lnTpslnTpslnApslnGps(5m)CpsAps(2s)TpsApsApsGps(5m)CpsApsGpsln |
| 053 | | TpslnTpslnG |
| ASO- | 5593 | lnApslnApsln(5m)CpslnApsTpsGps(2s)Tps(5m)CpsTpsGpsGpsAps(5m)C |
| 054 | | psln(5m)CpslnTpslnA |
| ASO- | 5594 | lnTpslnApslnTpsln(5m)CpsApsGps(8nh)Aps(5m)CpsApsTpsTpsApsTpsl |
| 055 | | nGpsln(5m)CpslnA |
| ASO- | 5595 | ln(5m)CpslnTpslnApslnTps(5m)CpsAps(8nh)GpsAps(5m)CpsApsTpsTps |
| 056 | | ApslnTpslnGpsln(5m)C |
| ASO- | 5596 | lnTpsln(5m)CpslnTpslnApsTps(5m)Cps(8nh)ApsGpsAps(5m)CpsApsTps |
| 057 | | TpslnApslnTpslnG |
| ASO- | 5597 | ln(5m)CpslnTpsln(5m)CpslnTpsApsTps(5oh)CpsApsGpsAps(5m)CpsAps |
| 058 | | TpslnTpslnApslnT |
| ASO- | 5598 | ln(5m)CpslnTpslnApslnTpsTpsAps(8nh)Aps(5m)CpsGpsTpsAps(5m)Cps |
| 059 | | (5m)CpslnTpslnGpslnT |
| ASO- | 5599 | lnGpslnTpslnApsln(5m)CpsGps(5m)Cps(8nh)Aps(5m)CpsAps(5m)CpsA |
| 060 | | psApsTpsln(5m)CpslnGpslnA |
| ASO- | 5600 | ln(5m)CpslnApslnGpslnTpsAps(5m)Cps(8nh)Gps(5m)CpsAps(5m)CpsA |
| 061 | | ps(5m)CpsApslnApslnTpsln(5m)C |
| ASO- | 5601 | lnGpsln(5m)Cpsln(5m)CpslnApsApsTps(2s)TpsTpsGpsGpsTps(5m)CpsA |
| 062 | | pslnTpsln(5m)CpslnT |
| ASO- | 5602 | lnApslnApslnTpslnTpsGpsTps(8nh)Gps(5m)CpsApsApsTpsTpsTpslnGps |
| 063 | | ln(5m)CpslnG |
| ASO- | 5603 | ln(5m)Cpsln(5m)CpslnApslnTpsApsTps(8nh)ApsGpsGps(5m)CpsApsGps |
| 064 | | (5m)CpslnTpsln(5m)CpslnT |
| ASO- | 5604 | lnTpsln(5m)Cpsln(5m)CpslnApsTpsAps(2s)TpsApsGpsGps(5m)CpsApsG |
| 065 | | psln(5m)CpslnTpsln(5m)C |
| ASO- | 5605 | lnTpslnTpslnApslnGpsGpsGps(5oh)CpsTps(5m)CpsTpsTps(5m)Cps(5m) |
| 066 | | CpslnApslnTpslnA |
| ASO- | 5606 | ln(5m)CpslnApslnTps(5m)Cps(8nh)Aps(5m)CpsTps(5m)CpsTpsTpsApsG |
| 067 | | psGpslnGpslnApslnA |
| ASO- | 5607 | lnGpslnTpslnGps(5m)Cps(8nh)GpsApsGps(5m)CpsTps(5m)CpsTpsApsT |
| 068 | | pslnTpsln(5m)CpslnT |
| ASO- | 5608 | lnGpslnTpslnGps(5m)Cps(8nh)GpsApsGps(5m)CpsTps(5m)CpsTpsApsT |
| 069 | | pslnTpsln(5m)CpslnT |
| ASO- | 5609 | lnTpslnTpslnApsGps(8nh)GpsGps(5m)CpsTps(5m)CpsTpsTps(5m)Cps |
| 070 | | (5m)CpslnApslnTpslnA |
| ASO- | 5610 | ln(5m)Cpsln(5m)CpslnApsTps(5oh)CpsAps(5m)CpsTps(5m)CpsTpsTpsA |
| 071 | | psGpslnGpslnGpslnA |
| ASO- | 5611 | lnTpslnGpsln(5m)CpsAps(5oh)CpsTpsApsApsTpsGpsGps(5m)CpsApslnT |
| 072 | | pslnApsln(5m)C |
| ASO- | 5612 | lnTpslnTpslnApsGps(5oh)CpsApsTpsApsApsGps(5m)CpsApsGpslnTpsln |
| 073 | | TpslnG |
| ASO- | 5613 | ln(5m)CpslnTpslnApsTps(5oh)CpsApsGpsAps(5m)CpsApsTpsTpsApslnT |
| 074 | | pslnGpsln(5m)C |
| ASO- | 5614 | ln(5m)CpslnTpslnApsTps(2s)TpsApsAps(5m)CpsGpsTpsAps(5m)Cps |
| 075 | | (5m)CpslnTpslnGpslnT |
| ASO- | 5615 | lnGpsln(5m)Cpsln(5m)CpsAps(8nh)ApsTpsTpsTpsGpsGpsTps(5m)CpsA |
| 076 | | pslnTpsln(5m)CpslnT |
| ASO- | 5616 | lnTpsln(5m)Cpsln(5m)CpsAps(2s)TpsApsTpsApsGpsGps(5m)CpsApsGps |
| 077 | | ln(5m)CpslnTpsln(5m)C |
| ASO- | 5617 | lnApslnTpsln(5m)CpsAps(5oh)CpsTps(5m)CpsTpsTpsApsGpsGpsGpslnA |
| 078 | | pslnApslnT |
| ASO- | 5618 | lnGpslnApsln(5m)CpsGps(8nh)GpsGps(5m)CpsTpsGps(5m)CpsAps(5m)C |
| 079 | | psTpslnTpslnApsln(5m)C |
| ASO- | 5619 | lnTpslnGpsln(5m)CpsGps(8nh)ApsGps(5m)CpsTps(5m)CpsTpsApsTpsT |
| 080 | | psln(5m)CpslnTpslnT |
| ASO- | 5620 | ln(5m)CpslnApslnTpsAps(8nh)GpsTpsAps(5m)CpsTpsAps(5m)CpsApsG |
| 081 | | pslnApslnTpslnA |
| ASO- | 5621 | lnApslnApsln(5m)CpsAps(2s)TpsGpsTps(5m)CpsTpsGpsGpsAps(5m)Cps |
| 082 | | ln(5m)CpslnTpslnA |
| ASO- | 5622 | lnTpslnApslnTps(5m)Cps(8nh)ApsGpsAps(5m)CpsApsTpsTpsApsTpslnG |
| 083 | | psln(5m)CpslnA |
| ASO- | 5623 | lnTpsln(5m)CpslnTpsAps(2s)Tps(5m)CpsApsGpsAps(5m)CpsApsTpsTps |
| 084 | | lnApslnTpslnG |
| ASO- | 5624 | ln(5m)CpslnTpsln(5m)CpsTps(8nh)ApsTps(5m)CpsApsGpsAps(5m)CpsA |
| 085 | | psTpslnTpslnApslnT |
| ASO- | 5625 | lnGpslnTpslnAps(5m)Cps(8nh)Gps(5m)CpsAps(5m)CpsAps(5m)CpsApsA |
| 086 | | psTpsln(5m)CpslnGpslnA |
| ASO- | 5626 | ln(5m)CpslnApslnGpsTps(8nh)Aps(5m)CpsGps(5m)CpsAps(5m)CpsAps |
| 087 | | (5m)CpsApslnApslnTpsln(5m)C |
| ASO- | 5627 | lnApslnApslnTpsTps(8nh)GpsTpsGps(5m)CpsApsApsTpsTpsTpslnGpsln |
| 088 | | (5m)CpslnG |
| ASO- | 5628 | ln(5m)Cpsln(5m)CpslnApsTps(8nh)ApsTpsApsGpsGps(5m)CpsApsGps |
| 089 | | (5m)CpslnTpsln(5m)CpslnT |
| ASO- | 5629 | lnTpslnTpslnApsTps(5oh)CpsAps(5m)Cps(5m)CpsGpsTpsTps(5m)CpsT |
| 090 | | psln(5m)CpslnApslnT |
| ASO- | 5630 | lnApslnApslnTps(5m)Cps(2s)Tps(5m)Cps(5m)Cps(5m)CpsApsApsGpsA |
| 091 | | psGpslnApslnGpslnA |
| ASO- | 5631 | lnApslnApslnApsAps(2s)TpsApsTpsAps(5m)CpsTpsTpsTps(5m)CpslnT |
| 092 | | psln(5m)CpslnT |
| ASO- | 5632 | lnTpslnApslnTpsTps(8nh)Aps(5m)CpsGpsApsTpsApsTpsGpsTpslnGpsln |
| 093 | | GpslnA |
| ASO- | 5633 | lnApsln(5m)CpslnApsAps(8nh)Gps(5m)CpsApsTps(5m)CpsTpsTps(5m)C |
| 094 | | psTpslnApslnApslnT |
| ASO- | 5634 | ln(5m)CpslnTpslnApsTps(5m)Cps(8nh)ApsGpsAps(5m)CpsApsTpsTpsA |
| 095 | | pslnTpslnGpsln(5m)C |
| ASO- | 5635 | lnTpsln(5m)CpslnTpsApsTps(5oh)CpsApsGpsAps(5m)CpsApsTpsTpslnA |
| 096 | | pslnTpslnG |
| ASO- | 5636 | ln(5m)CpslnTpsln(5m)CpsTpsAps(2s)Tps(5m)CpsApsGpsAps(5m)CpsA |
| 097 | | psTpslnTpslnApslnT |
| ASO- | 5637 | ln(5m)CpslnTpslnApsTpsTps(8nh)ApsAps(5m)CpsGpsTpsAps(5m)Cps |
| 098 | | (5m)CpslnTpslnGpslnT |
| ASO- | 5638 | lnGpslnTpslnAps(5m)CpsGps(5oh)CpsAps(5m)CpsAps(5m)CpsApsApsT |
| 099 | | psln(5m)CpslnGpslnA |
| ASO- | 5639 | ln(5m)CpslnApslnGpsTpsAps(5oh)CpsGps(5m)CpsAps(5m)CpsAps(5m)C |
| 100 | | psApslnApslnTpsln(5m)C |
| ASO- | 5640 | lnGpsln(5m)Cpsln(5m)CpsApsAps(2s)TpsTpsTpsGpsGpsTps(5m)CpsAps |
| 101 | | lnTpsln(5m)CpslnT |
| ASO- | 5641 | lnApslnApslnTpsTpsGps(2s)TpsGps(5m)CpsApsApsTpsTpsTpslnGpsln |
| 102 | | (5m)CpslnG |
| ASO- | 5642 | ln(5m)Cpsln(5m)CpslnApsTpsAps(2s)TpsApsGpsGps(5m)CpsApsGps |
| 103 | | (5m)CpslnTpsln(5m)CpslnT |
| ASO- | 5643 | lnTpsln(5m)Cpsln(5m)CpsApsTps(8nh)ApsTpsApsGpsGps(5m)CpsApsG |
| 104 | | psln(5m)CpslnTpsln(5m)C |
| ASO- | 5644 | lnTpslnTpslnApsGpsGps(8nh)Gps(5m)CpsTps(5m)CpsTpsTps(5m)Cps |
| 105 | | (5m)CpslnApslnTpslnA |
| ASO- | 5645 | lnApslnTpsln(5m)CpsAps(5m)Cps(2s)Tps(5m)CpsTpsTpsApsGpsGpsGps |
| 106 | | lnApslnApslnT |
| ASO- | 5646 | ln(5m)CpslnApslnTps(5m)CpsAps(5oh)CpsTps(5m)CpsTpsTpsApsGpsG |
| 107 | | pslnGpslnApslnA |
| ASO- | 5647 | ln(5m)Cpsln(5m)CpslnApsTps(5m)Cps(8nh)Aps(5m)CpsTps(5m)CpsTps |
| 108 | | TpsApsGpslnGpslnGpslnA |
| ASO- | 5648 | lnGpslnApsln(5m)CpsGpsGps(8nh)Gps(5m)CpsTpsGps(5m)CpsAps(5m)C |
| 109 | | psTpslnTpslnApsln(5m)C |
| ASO- | 5649 | lnTpslnGpsln(5m)CpsAps(5m)Cps(2s)TpsApsApsTpsGpsGps(5m)CpsAps |
| 110 | | lnTpslnApsln(5m)C |
| ASO- | 5650 | lnTpslnGpsln(5m)CpsGpsAps(8nh)Gps(5m)CpsTps(5m)CpsTpsApsTpsT |
| 111 | | psln(5m)CpslnTpslnT |
| ASO- | 5651 | lnGpslnTpslnGps(5m)CpsGps(8nh)ApsGps(5m)CpsTps(5m)CpsTpsApsT |
| 112 | | pslnTpsln(5m)CpslnT |
| ASO- | 5652 | ln(5m)CpslnApslnTpsApsGps(2s)TpsAps(5m)CpsTpsAps(5m)CpsApsGps |
| 113 | | lnApslnTpslnA |
| ASO- | 5653 | lnTpslnTpslnApsGps(5m)Cps(8nh)ApsTpsApsApsGps(5m)CpsApsGpslnT |
| 114 | | pslnTpslnG |
| ASO- | 5654 | lnApslnApsln(5m)CpsApsTps(8nh)GpsTps(5m)CpsTpsGpsGpsAps(5m)C |
| 115 | | psln(5m)CpslnTpslnA |
| ASO- | 5655 | lnTpslnApslnTps(5m)CpsAps(8nh)GpsAps(5m)CpsApsTpsTpsApsTpslnG |
| 116 | | psln(5m)CpslnA |
| ASO- | 5656 | lnApslnGpslnTpslnApsTpsAps(5m)CpsTpsTpsApsGps(5m)CpsApsApsln |
| 117 | | (5m)CpslnApslnTpslnT |
| ASO- | 5657 | lnTpslnApslnGpslnGpsApsTpsAps(5m)CpsApsAps(5m)CpsAps(5m)CpsG |
| 118 | | pslnTpsln(5m)Cpsln(5m)Cpsln(5m)C |
| ASO- | 5658 | lnApslnApslnTpslnApsTpsApsApsAps(5m)CpsAps(5m)Cps(5m)CpsAps |
| 119 | | (5m)CpslnTpslnApslnTpslnG |
| ASO- | 5659 | ln(5m)CpslnTpslnApsTps(2s)TpsApsAps(5m)CpsGpsTpsAps(5m)Cpsln |
| 120 | | (5m)CpslnTpslnGpslnT |
| ASO- | 5660 | lnGpslnTpslnAps(5m)Cps(8nh)Gps(5m)CpsAps(5m)CpsAps(5m)CpsApsA |
| 121 | | pslnTpsln(5m)CpslnGpslnA |
| ASO- | 5661 | ln(5m)CpslnApslnGpsTps(8nh)Aps(5m)CpsGps(5m)CpsAps(5m)CpsAps |
| 122 | | (5m)CpslnApslnApslnTpsln(5m)C |
| ASO- | 5662 | lnGpsln(5m)Cpsln(5m)CpsAps(8nh)ApsTpsTpsTpsGpsGpsTps(5m)Cpsln |
| 123 | | ApslnTpsln(5m)CpslnT |
| ASO- | 5663 | lnApslnApslnTpsTps(8nh)GpsTpsGps(5m)CpsApsApsTpsTpslnTpslnGps |
| 124 | | ln(5m)CpslnG |
| ASO- | 5664 | ln(5m)Cpsln(5m)CpslnApsTps(8nh)ApsTpsApsGpsGps(5m)CpsApsGpsln |
| 125 | | (5m)CpslnTpsln(5m)CpslnT |
| ASO- | 5665 | lnTpsln(5m)Cpsln(5m)CpsAps(2s)TpsApsTpsApsGpsGps(5m)CpsApslnG |
| 126 | | psln(5m)CpslnTpsln(5m)C |
| ASO- | 5666 | lnTpslnTpslnApsGps(8nh)GpsGps(5m)CpsTps(5m)CpsTpsTps(5m)Cpsln |
| 127 | | (5m)CpslnApslnTpslnA |
| ASO- | 5667 | lnApslnTpsln(5m)CpsAps(5oh)CpsTps(5m)CpsTpsTpsApsGpsGpslnGps |
| 128 | | lnApslnApslnT |
| ASO- | 5668 | lnApslnTpsln(5m)CpsAps(5oh)CpsTps(5m)CpsTpsTpsApsGpsGpslnGps |
| 129 | | lnApslnApslnT |
| ASO- | 5669 | lnTpslnGpsln(5m)CpsAps(5oh)CpsTpsApsApsTpsGpsGps(5m)CpslnAps |
| 130 | | lnTpslnApsln(5m)C |
| ASO- | 5670 | lnTpslnTpslnApsGps(5oh)CpsApsTpsApsApsGps(5m)CpsApslnGpslnTps |
| 131 | | lnTpslnG |
| ASO- | 5671 | ln(5m)CpslnTpslnApsTps(5oh)CpsApsGpsAps(5m)CpsApsTpsTpslnAps |
| 132 | | lnTpslnGpsln(5m)C |
| ASO- | 5672 | ln(5m)CpslnApslnTps(5m)Cps(8nh)Aps(5m)CpsTps(5m)CpsTpsTpsApsG |
| 133 | | pslnGpslnGpslnApslnA |
| ASO- | 5673 | ln(5m)Cpsln(5m)CpslnApsTps(5oh)CpsAps(5m)CpsTps(5m)CpsTpsTpsA |
| 134 | | pslnGpslnGpslnGpslnA |
| ASO- | 5674 | lnGpslnApsln(5m)CpsGps(8nh)GpsGps(5m)CpsTpsGps(5m)CpsAps(5m)C |
| 135 | | pslnTpslnTpslnApsln(5m)C |
| ASO- | 5675 | lnTpslnGpsln(5m)CpsGps(8nh)ApsGps(5m)CpsTps(5m)CpsTpsApsTpsln |
| 136 | | Tpsln(5m)CpslnTpslnT |
| ASO- | 5676 | lnGpslnTpslnGps(5m)Cps(8nh)GpsApsGps(5m)CpsTps(5m)CpsTpsApsln |
| 137 | | TpslnTpsln(5m)CpslnT |
| ASO- | 5677 | ln(5m)CpslnApslnTpsAps(8nh)GpsTpsAps(5m)CpsTpsAps(5m)CpsApsln |
| 138 | | GpslnApslnTpslnA |
| ASO- | 5678 | lnApslnApsln(5m)CpsAps(2s)TpsGpsTps(5m)CpsTpsGpsGpsApsln(5m)C |
| 139 | | psln(5m)CpslnTpslnA |
| ASO- | 5679 | lnTpslnApslnTps(5m)Cps(8nh)ApsGpsAps(5m)CpsApsTpsTpsApslnTps |
| 140 | | lnGpsln(5m)CpslnA |
| ASO- | 5680 | lnTpsln(5m)CpslnTpsAps(2s)Tps(5m)CpsApsGpsAps(5m)CpsApsTpslnT |
| 141 | | pslnApslnTpslnG |
| ASO- | 5681 | ln(5m)CpslnTpsln(5m)CpsTps(8nh)ApsTps(5m)CpsApsGpsAps(5m)CpsA |
| 142 | | pslnTpslnTpslnApslnT |
| ASO- | 5682 | moe(5m)Cpsmoe(5m)CpsmoeApsmoeTpsmoe(5m)CpsAps(5m)CpsTps(5m)C |
| 143 | | psTpsTpsApsGpsGpsGpsmoeApsmoeApsmoeTpsmoe(5m)CpsmoeT |
| ASO- | 5683 | moeTpsmoe(5m)Cpsmoe(5m)CpsmoeApsmoeTps(5m)CpsAps(5m)CpsTps |
| 144 | | (5m)CpsTpsTpsApsGpsGpsmoeGpsmoeApsmoeApsmoeTpsmoe(5m)C |
| ASO- | 5684 | moeTpsmoeTpsmoe(5m)Cpsmoe(5m)CpsmoeApsTps(5m)CpsAps(5m)CpsTps |
| 145 | | (5m)CpsTpsTpsApsGpsmoeGpsmoeGpsmoeApsmoeApsmoeT |
| ASO- | 5685 | moeGpsmoeTpsmoeTpsmoe(5m)Cpsmoe(5m)CpsApsTps(5m)CpsAps(5m)Cps |
| 146 | | Tps(5m)CpsTpsTpsApsmoeGpsmoeGpsmoeGpsmoeApsmoeA |
| ASO- | 5686 | moeApsmoeGpsmoeTpsmoeTpsmoe(5m)Cps(5m)CpsApsTps(5m)CpsAps(5m) |
| 147 | | CpsTps(5m)CpsTpsTpsmoeApsmoeGpsmoeGpsmoeGpsmoeA |
| ASO- | 5687 | moeGpsmoeApsmoe(5m)CpsmoeGpsmoeGpsGps(5m)CpsTpsGps(5m)CpsAps |
| 148 | | (5m)CpsTpsTpsApsmoe(5m)CpsmoeApsmoe(5m)Cpsmoe(5m)CpsmoeG |
| ASO- | 5688 | moeApsmoeGpsmoeApsmoe(5m)CpsmoeGpsGpsGps(5m)CpsTpsGps(5m)CpsA |
| 149 | | ps(5m)CpsTpsTpsmoeApsmoe(5m)CpsmoeApsmoe(5m)Cpsmoe(5m)C |
| ASO- | 5689 | moeApsmoeApsmoeGpsmoeApsmoe(5m)CpsGpsGpsGps(5m)CpsTpsGps(5m)C |
| 150 | | psAps(5m)CpsTpsmoeTpsmoeApsmoe(5m)CpsmoeApsmoe(5m)C |
| ASO- | 5690 | moeTpsmoeApsmoeApsmoeGpsmoeAps(5m)CpsGpsGpsGps(5m)CpsTpsGps |
| 151 | | (5m)CpsAps(5m)CpsmoeTpsmoeTpsmoeApsmoe(5m)CpsmoeA |
| ASO- | 5691 | moeGpsmoeTpsmoeApsmoeApsmoeGpsAps(5m)CpsGpsGpsGps(5m)CpsTpsG |
| 152 | | ps(5m)CpsApsmoe(5m)CpsmoeTpsmoeTpsmoeApsmoe(5m)C |
| ASO- | 5692 | moeTpsmoeGpsmoe(5m)CpsmoeGpsmoeApsGps(5m)CpsTps(5m)CpsTpsApsT |
| 153 | | psTps(5m)CpsTpsmoeTpsmoeTpsmoeGpsmoe(5m)CpsmoeA |
| ASO- | 5693 | moeGpsmoeTpsmoeGpsmoe(5m)CpsmoeGpsApsGps(5m)CpsTps(5m)CpsTpsA |
| 154 | | psTpsTps(5m)CpsmoeTpsmoeTpsmoeTpsmoeGpsmoe(5m)C |
| ASO- | 5694 | moeGpsmoeGpsmoeTpsmoeGpsmoe(5m)CpsGpsApsGps(5m)CpsTps(5m)CpsT |
| 155 | | psApsTpsTpsmoe(5m)CpsmoeTpsmoeTpsmoeTpsmoeG |
| ASO- | 5695 | moe(5m)CpsmoeGpsmoeGpsmoeTpsmoeGps(5m)CpsGpsApsGps(5m)CpsTps |
| 156 | | (5m)CpsTpsApsTpsmoeTpsmoe(5m)CpsmoeTpsmoeTpsmoeT |
| ASO- | 5696 | moeApsmoe(5m)CpsmoeGpsmoeGpsmoeTpsGps(5m)CpsGpsApsGps(5m)CpsT |
| 157 | | ps(5m)CpsTpsApsmoeTpsmoeTpsmoe(5m)CpsmoeTpsmoeT |
| ASO- | 5697 | moeApsmoeApsmoe(5m)CpsmoeApsmoeTpsGpsTps(5m)CpsTpsGpsGpsAps |
| 158 | | (5m)Cps(5m)CpsTpsmoeApsmoeTpsmoeApsmoeGpsmoeT |
| ASO- | 5698 | moeGpsmoeApsmoeApsmoe(5m)CpsmoeApsTpsGpsTps(5m)CpsTpsGpsGpsA |
| 159 | | ps(5m)Cps(5m)CpsmoeTpsmoeApsmoeTpsmoeApsmoeG |
| ASO- | 5699 | moeGpsmoeGpsmoeApsmoeApsmoe(5m)CpsApsTpsGpsTps(5m)CpsTpsGpsG |
| 160 | | psAps(5m)Cpsmoe(5m)CpsmoeTpsmoeApsmoeTpsmoeA |
| ASO- | 5700 | moeApsmoeGpsmoeGpsmoeApsmoeAps(5m)CpsApsTpsGpsTps(5m)CpsTpsG |
| 161 | | psGpsApsmoe(5m)Cpsmoe(5m)CpsmoeTpsmoeApsmoeT |
| ASO- | 5701 | moeGpsmoeApsmoeGpsmoeGpsmoeApsAps(5m)CpsApsTpsGpsTps(5m)CpsT |
| 162 | | psGpsGpsmoeApsmoe(5m)Cpsmoe(5m)CpsmoeTpsmoeA |
| ASO- | 5702 | moe(5m)Cpsmoe(5m)CpsmoeApsmoeTpsmoe(5m)CpsAps(5m)Cps(2s)Tps |
| 163 | | (5m)CpsTpsTpsApsGpsGpsGpsmoeApsmoeApsmoeTpsmoe(5m)CpsmoeT |
| ASO- | 5703 | moeTpsmoe(5m)Cpsmoe(5m)CpsmoeApsmoeTps(5m)CpsAps(5oh)CpsTps |
| 164 | | (5m)CpsTpsTpsApsGpsGpsmoeGpsmoeApsmoeApsmoeTpsmoe(5m)C |
| ASO- | 5704 | moeTpsmoeTpsmoe(5m)Cpsmoe(5m)CpsmoeApsTps(5m)Cps(8nh)Aps(5m)C |
| 165 | | psTps(5m)CpsTpsTpsApsGpsmoeGpsmoeGpsmoeApsmoeApsmoeT |
| ASO- | 5705 | moeGpsmoeTpsmoeTpsmoe(5m)Cpsmoe(5m)CpsApsTps(5oh)CpsAps(5m)C |
| 166 | | psTps(5m)CpsTpsTpsApsmoeGpsmoeGpsmoeGpsmoeApsmoeA |
| ASO- | 5706 | moeApsmoeGpsmoeTpsmoeTpsmoe(5m)Cps(5m)CpsAps(2s)Tps(5m)CpsAps |
| 167 | | (5m)CpsTps(5m)CpsTpsTpsmoeApsmoeGpsmoeGpsmoeGpsmoeA |
| ASO- | 5707 | moeGpsmoeApsmoe(5m)CpsmoeGpsmoeGpsGps(5m)Cps(2s)TpsGps(5m)Cps |
| 168 | | Aps(5m)CpsTpsTpsApsmoe(5m)CpsmoeApsmoe(5m)Cpsmoe(5m)CpsmoeG |
| ASO- | 5708 | moeApsmoeGpsmoeApsmoe(5m)CpsmoeGpsGpsGps(5oh)CpsTpsGps(5m)Cps |
| 169 | | Aps(5m)CpsTpsTpsmoeApsmoe(5m)CpsmoeApsmoe(5m)Cpsmoe(5m)C |
| ASO- | 5709 | moeApsmoeApsmoeGpsmoeApsmoe(5m)CpsGpsGps(8nh)Gps(5m)CpsTpsGps |
| 170 | | (5m)CpsAps(5m)CpsTpsmoeTpsmoeApsmoe(5m)CpsmoeApsmoe(5m)C |
| ASO- | 5710 | moeTpsmoeApsmoeApsmoeGpsmoeAps(5m)CpsGps(8nh)GpsGps(5m)CpsTps |
| 171 | | Gps(5m)CpsAps(5m)CpsmoeTpsmoeTpsmoeApsmoe(5m)CpsmoeA |
| ASO- | 5711 | moeGpsmoeTpsmoeApsmoeApsmoeGpsAps(5m)Cps(8nh)GpsGpsGps(5m)Cps |
| 172 | | TpsGps(5m)CpsApsmoe(5m)CpsmoeTpsmoeTpsmoeApsmoe(5m)C |
| ASO- | 5712 | moeTpsmoeGpsmoe(5m)CpsmoeGpsmoeApsGps(5m)Cps(2s)Tps(5m)CpsTps |
| 173 | | ApsTpsTps(5m)CpsTpsmoeTpsmoeTpsmoeGpsmoe(5m)CpsmoeA |
| ASO- | 5713 | moeGpsmoeTpsmoeGpsmoe(5m)CpsmoeGpsApsGps(5oh)CpsTps(5m)CpsTps |
| 174 | | ApsTpsTps(5m)CpsmoeTpsmoeTpsmoeTpsmoeGpsmoe(5m)C |
| ASO- | 5714 | moeGpsmoeGpsmoeTpsmoeGpsmoe(5m)CpsGpsAps(8nh)Gps(5m)CpsTps |
| 175 | | (5m)CpsTpsApsTpsTpsmoe(5m)CpsmoeTpsmoeTpsmoeTpsmoeG |
| ASO- | 5715 | moe(5m)CpsmoeGpsmoeGpsmoeTpsmoeGps(5m)CpsGps(8nh)ApsGps(5m)C |
| 176 | | psTps(5m)CpsTpsApsTpsmoeTpsmoe(5m)CpsmoeTpsmoeTpsmoeT |
| ASO- | 5716 | moeApsmoeApsmoe(5m)CpsmoeApsmoeTpsGpsTps(5oh)CpsTpsGpsGpsAps |
| 177 | | (5m)Cps(5m)CpsTpsmoeApsmoeTpsmoeApsmoeGpsmoeT |
| ASO- | 5717 | moeGpsmoeApsmoeApsmoe(5m)CpsmoeApsTpsGps(2s)Tps(5m)CpsTpsGpsG |
| 178 | | psAps(5m)Cps(5m)CpsmoeTpsmoeApsmoeTpsmoeApsmoeG |
| ASO- | 5718 | moeGpsmoeGpsmoeApsmoeApsmoe(5m)CpsApsTps(8nh)GpsTps(5m)CpsTps |
| 179 | | GpsGpsAps(5m)Cpsmoe(5m)CpsmoeTpsmoeApsmoeTpsmoeA |

lnX = locked nucleic acid (LNA) (e.g., lnG = locked nucleic acid (LNA) G);
(5m)lnX = locked nucleic acid (LNA)-5methy1 nucleotide (e.g., (5m)lNC_= LNA-5methy1 C);
(5m)X = 5 methyl nucleotide (e.g., (5m)C = 5 methyl C);
mX = 2′-O-methoxy nucleotide (e.g., mA = 2′-O-methoxy A);
(8nh)X = 8-amino nucleotide (e.g., (8nh)G = 8-amino G);
(2s)X = 2-thio nucleotide (e.g., (2s)T = 2-thio T);
(5oh)X = 5-hydroxy nucleotide (e.g., (5oh)C = 5-hydroxy C);
cpX = scpX = cyclopropyl nucleotide (e.g., cp (5m) C = scp (5m) C = cyclopropyl (5m) C);
ps = phosphorothioate linkages;
moeX = 2′-O-methoxyethylribose nucleotide (e.g., moeG = 2′-O-methoxyethylribose G);
moe(5m)X = 2′-O-methoxyethylribose 5 methyl nucleotide (e.g., moe(5m)C = 2′-O-methoxyethylribose 5 methyl C).

[0127] In some embodiments, an ASO of the present disclosure may comprise any one of SEQ ID NOs: 5539-5718. In some embodiments, the ASO can be a 16-mer or a 20-mer.

[0128] In some embodiments, the ASO may be selected from ASO-143 (SEQ ID NO: 5682), ASO-144 (SEQ ID NO: 5683), ASO-145 (SEQ ID NO: 5684), ASO-146 (SEQ ID NO: 5685), ASO-147 (SEQ ID NO: 5686), ASO-148 (SEQ ID NO: 5687), ASO-149 (SEQ ID NO: 5688), ASO-150 (SEQ ID NO: 5689), ASO-151 (SEQ ID NO: 5690), ASO-152 (SEQ ID NO: 5691), ASO-153 (SEQ ID NO: 5692), ASO-154 (SEQ ID NO: 5693), ASO-155 (SEQ ID NO: 5694), ASO-156 (SEQ ID NO: 5695), ASO-158 (SEQ ID NO: 5697), ASO-159 (SEQ ID NO: 5698), and ASO-160 (SEQ ID NO: 5699), or a further modified form thereof. For example, ASO-163 to ASO-179 correspond to each of ASO-143 to ASO-156/ASO-158 to ASO-160, respectively, but ASO-163 to ASO-179 have been further modified at position 3 to detoxify the ASOs that were active but showed some toxicity. Such detoxifying modification can include, but are not limited to, incorporation of scpBNA, AmNA (N—H), AmNA (N-Me), GuNA, GuNA (N-R) where R is selected from Me, Et, iPr, tBu and combinations thereof. Accordingly, in some embodiments, the ASO may be selected from ASO-163 (SEQ ID NO: 5702), ASO-164 (SEQ ID NO: 5703), ASO-165 (SEQ ID NO: 5704), ASO-166 (SEQ ID NO: 5705), ASO-167 (SEQ ID NO: 5706), ASO-168 (SEQ ID NO: 5707), ASO-169 (SEQ ID NO: 5708), ASO-170 (SEQ ID NO: 5709), ASO-171 (SEQ ID NO: 5710), ASO-172 (SEQ ID NO: 5711), ASO-173 (SEQ ID NO: 5712), ASO-174 (SEQ ID NO: 5713), ASO-175 (SEQ ID NO: 5714), ASO-176 (SEQ ID NO: 5715), ASO-177 (SEQ ID NO: 5716), ASO-178 (SEQ ID NO: 5717), and ASO-179 (SEQ ID NO: 5718). All of these siNA also showed high potency across screening assays (see Examples). Those skilled in the art will understand that other analogs can be similarly constructed.

[0129] Any of the foregoing specific embodiments can be incorporated into a pharmaceutical composition, either alone or in combination with 1, 2, 3, 4, 5, 6, 7, 8, 9, or 10 or more additional siNA disclosed herein. Any of the foregoing specific embodiments can be used to treat or prevent viral infections, such as coronavirus infections (e.g., COVID-19) pursuant to the methods and uses disclosed herein.

### Pharmaceutical Compositions

[0130] The present disclosure also encompasses pharmaceutical compositions comprising ASOs of the present disclosure. One embodiment is a pharmaceutical composition comprising one or more ASO of the present disclosure, and a pharmaceutically acceptable diluent or carrier.

[0131] In some embodiments, the pharmaceutical compositions comprising any of the ASO molecules, sense strands, antisense strands, first nucleotide sequences, or second nucleotide sequences described herein. The compositions may comprise 1, 2, 3, 4, 5, 6, 7, 8, 9, 10, 11, 12 or more ASO molecules described herein. The compositions may comprise a first nucleotide sequence comprising a nucleotide sequence of any one SEQ ID NOs: 1-5534. In some embodiments, the composition comprises a second nucleotide sequence comprising a nucleotide sequence of any one of SEQ ID NOs: 1-5534.

[0132] In some embodiments, the pharmaceutical composition containing the ASO of the present disclosure is formulated for systemic administration via parenteral delivery. Parenteral administration includes intravenous, intra-arterial, subcutaneous, intraperitoneal or intramuscular injection or infusion; also subdermal administration, e.g., via an implanted device. In a preferred embodiment, the pharmaceutical composition containing the ASO of the present disclosure is formulated for subcutaneous (SC) or intravenous (IV) delivery. Formulations for parenteral administration may include sterile aqueous solutions, which may also contain buffers, diluents and other pharmaceutically acceptable additives as understood by the skilled artisan. For intravenous use, the total concentration of solutes may be controlled to render the preparation isotonic.

[0133] The pharmaceutical compositions containing the ASO of the present disclosure are useful for treating a disease or disorder, e.g., associated with the expression or activity of a coronavirus gene, more specifically a non-structural protein, such as nsp8, nsp9, nsp10, nsp11, nsp12, nsp13, nsp14, or nsp15.

[0134] In some embodiments, the pharmaceutical composition comprises an ASO of the present disclosure that is complementary or hybridizes to a viral target RNA sequence (e.g., a non-structural protein of coronavirus), and a pharmaceutically acceptable diluent or carrier. When the pharmaceutical composition comprises two or more ASOs, the ASOs may be present in varying amounts. For example, in some embodiments, the weight ratio of first ASO to second ASO is 1:4 to 4:1, e.g., 1:4, 1:3, 1:2, 1:1, 2:1, 3:1, or 4:1. In some embodiments, the molar ratio of first ASO to second ASO is 1:4 to 4:1, e.g., 1:4, 1:3, 1:2, 1:1, 2:1, 3:1, or 4:1.

[0135] In some embodiments, the pharmaceutical composition comprises an amount of one or more of the ASO molecules described herein formulated with one or more pharmaceutically acceptable carriers (additives) and/or diluents. The pharmaceutical compositions may be specially formulated for administration in solid or liquid form, including those adapted for the following: (1) parenteral administration, for example, by subcutaneous, intramuscular, intravenous or epidural injection as, for example, a sterile solution or suspension, or sustained-release formulation; (2) topical application, for example, as a cream, ointment, or a controlled-release patch or spray applied to the skin; (3) intravaginally or intrarectally, for example, as a pessary, cream or foam; (4) sublingually; (5) ocularly; (6) transdermally; or (7) nasally.

[0136] Wetting agents, emulsifiers and lubricants, such as sodium lauryl sulfate and magnesium stearate, as well as coloring agents, release agents, coating agents, sweetening, flavoring and perfuming agents, preservatives and antioxidants can also be present in the compositions.

[0137] Examples of pharmaceutically-acceptable antioxidants include: (1) water soluble antioxidants, such as ascorbic acid, cysteine hydrochloride, sodium bisulfate, sodium metabisulfite, sodium sulfite and the like; (2) oil-soluble antioxidants, such as ascorbyl palmitate, butylated hydroxyanisole (BHA), butylated hydroxytoluene (BHT), lecithin, propyl gallate, alpha-tocopherol, and the like; and (3) metal chelating agents, such as citric acid, ethylenediamine tetraacetic acid (EDTA), sorbitol, tartaric acid, phosphoric acid, and the like.

[0138] Formulations of the present disclosure include those suitable for nasal, topical (including buccal and sublingual), rectal, vaginal and/or parenteral administration. The formulations may be presented in unit dosage form and may be prepared by any methods well known in the art of pharmacy. The amount of the one or more ASOs which can be combined with a carrier material to produce a single dosage form will vary depending upon the host being treated, the particular mode of administration, and/or the type and severity of coronavirus infection. The amount of active ingredient which can be combined with a carrier material to produce a single dosage form will generally be that amount of the compound (e.g., ASO molecule) which produces a therapeutic effect. Generally, out of one hundred percent, this amount will range from about 0.1 percent to about ninety-nine percent of active ingredient, preferably from about 5 percent to about 70 percent, most preferably from about 10 percent to about 30 percent.

[0139] In some embodiments, a formulation of the present disclosure comprises an excipient selected from the group consisting of cyclodextrins, celluloses, liposomes, micelle forming agents, e.g., bile acids, and polymeric carriers, e.g., polyesters and polyanhydrides; and a compound (e.g., ASO molecule) of the present disclosure.

[0140] Methods of preparing these formulations or compositions include the step of bringing into association a compound (e.g., ASO molecule) of the present disclosure with the carrier and, optionally, one or more accessory ingredients. In general, the formulations are prepared by uniformly and intimately bringing into association a compound (e.g., ASO molecule) of the present disclosure with liquid carriers, or finely divided solid carriers, or both, and then, if necessary, shaping the product.

[0141] Formulations of the disclosure suitable for a suspension in an aqueous or non-aqueous liquid, or as an oil-in-water or water-in-oil liquid emulsion, or as an elixir or syrup, each containing a predetermined amount of a compound (e.g., ASO molecule) of the present disclosure as an active ingredient. A compound (e.g., ASO molecule) of the present disclosure may also be administered as a bolus, electuary, or paste.

[0142] In dosage forms of the disclosure, the active ingredient may be mixed with one or more pharmaceutically-acceptable carriers, such as sodium citrate or dicalcium phosphate, and/or any of the following: (1) fillers or extenders, such as starches, lactose, sucrose, glucose, mannitol, and/or silicic acid; (2) binders, such as, for example, carboxymethylcellulose, alginates, gelatin, polyvinyl pyrrolidone, sucrose and/or acacia; (3) humectants, such as glycerol; (4) disintegrating agents, such as agar-agar, calcium carbonate, potato or tapioca starch, alginic acid, certain silicates, and sodium carbonate; (5) solution retarding agents, such as paraffin; (6) absorption accelerators, such as quaternary ammonium compounds and surfactants, such as poloxamer and sodium lauryl sulfate; (7) wetting agents, such as, for example, cetyl alcohol, glycerol monostearate, and non-ionic surfactants; (8) absorbents, such as kaolin and bentonite clay; (9) lubricants, such as talc, calcium stearate, magnesium stearate, solid polyethylene glycols, sodium lauryl sulfate, zinc stearate, sodium stearate, stearic acid, and mixtures thereof; (10) coloring agents; and (11) controlled release agents such as crospovidone or ethyl cellulose.

[0143] The disclosed dosage forms may be sterilized by, for example, filtration through a bacteria-retaining filter, or by incorporating sterilizing agents in the form of sterile solid compositions which can be dissolved in sterile water, or some other sterile injectable medium immediately before use. These compositions may also optionally contain opacifying agents and may be of a composition that they release the active ingredient(s) only, or preferentially, in a certain portion of the gastrointestinal tract, optionally, in a delayed manner. Examples of embedding compositions which can be used include polymeric substances and waxes. The active ingredient can also be in micro-encapsulated form, if appropriate, with one or more of the above-described excipients.

[0144] Liquid dosage forms the compounds (e.g., ASO molecules) of the disclosure include pharmaceutically acceptable emulsions, microemulsions, solutions, suspensions, syrups and elixirs. In addition to the active ingredient, the liquid dosage forms may contain inert diluents commonly used in the art, such as, for example, water or other solvents, solubilizing agents and emulsifiers, such as ethyl alcohol, isopropyl alcohol, ethyl carbonate, ethyl acetate, benzyl alcohol, benzyl benzoate, propylene glycol, 1,3-butylene glycol, oils (I particular, cottonseed, groundnut, corn, germ, olive, castor and sesame oils), glycerol, tetrahydrofuryl alcohol, polyethylene glycols and fatty acid esters of sorbitan, and mixtures thereof.

[0145] Besides inert diluents, the compositions can also include adjuvants such as wetting agents, emulsifying and suspending agents, sweetening, flavoring, coloring, perfuming and preservative agents.

[0146] Suspensions, in addition to the active compounds (e.g., ASO molecules), may contain suspending agents as, for example, ethoxylated isostearyl alcohols, polyoxyethylene sorbitol and sorbitan esters, microcrystalline cellulose, aluminum metahydroxide, bentonite, agar-agar and tragacanth, and mixtures thereof.

[0147] Formulations of the pharmaceutical compositions of the disclosure for rectal or vaginal administration may be presented as a suppository, which may be prepared by mixing one or more compounds (e.g., ASO molecules) of the disclosure with one or more suitable nonirritating excipients or carriers comprising, for example, cocoa butter, polyethylene glycol, a suppository wax or a salicylate, and which is solid at room temperature, but liquid at body temperature and, therefore, will melt in the rectum or vaginal cavity and release the active compound (e.g., ASO molecule).

[0148] Formulations of the present disclosure which are suitable for vaginal administration also include pessaries, tampons, creams, gels, pastes, foams or spray formulations containing such carriers as are known in the art to be appropriate.

[0149] Dosage forms for the topical or transdermal administration of a compound (e.g., ASO molecule) of this disclosure include powders, sprays, ointments, pastes, creams, lotions, gels, solutions, patches and inhalants. The active compound (e.g., ASO molecule) may be mixed under sterile conditions with a pharmaceutically acceptable carrier, and with any preservatives, buffers, or propellants which may be required.

[0150] The ointments, pastes, creams and gels may contain, in addition to an active compound (e.g., ASO molecule) of this disclosure, excipients, such as animal and vegetable fats, oils, waxes, paraffins, starch, tragacanth, cellulose derivatives, polyethylene glycols, silicones, bentonites, silicic acid, talc and zinc oxide, or mixtures thereof

[0151] Powders and sprays can contain, in addition to a compound (e.g., ASO molecule) of this disclosure, excipients such as lactose, talc, silicic acid, aluminum hydroxide, calcium silicates and polyamide powder, or mixtures of these substances. Sprays can additionally contain customary propellants, such as chlorofluorohydrocarbons and volatile unsubstituted hydrocarbons, such as butane and propane.

[0152] Transdermal patches have the added advantage of providing controlled delivery of a compound (e.g., ASO molecule) of the present disclosure to the body. Such dosage forms can be made by dissolving or dispersing the compound (e.g., ASO molecule) in the proper medium. Absorption enhancers can also be used to increase the flux of the compound (e.g., ASO molecule) across the skin. The rate of such flux can be controlled by either providing a rate controlling membrane or dispersing the compound (e.g., ASO molecule) in a polymer matrix or gel.

[0153] Ophthalmic formulations, eye ointments, powders, solutions and the like, are also contemplated as being within the scope of this invention.

[0154] Pharmaceutical compositions of this disclosure suitable for parenteral administration comprise one or more compounds (e.g., ASO molecules) of the disclosure in combination with one or more pharmaceutically-acceptable sterile isotonic aqueous or nonaqueous solutions, dispersions, suspensions or emulsions, or sterile powders which may be reconstituted into sterile injectable solutions or dispersions just prior to use, which may contain sugars, alcohols, antioxidants, buffers, bacteriostats, solutes which render the formulation isotonic with the blood of the intended recipient or suspending or thickening agents.

[0155] Examples of suitable aqueous and nonaqueous carriers which may be employed in the pharmaceutical compositions of the disclosure include water, ethanol, polyols (such as glycerol, propylene glycol, polyethylene glycol, and the like), and suitable mixtures thereof, vegetable oils, such as olive oil, and injectable organic esters, such as ethyl oleate. Proper fluidity can be maintained, for example, by the use of coating materials, such as lecithin, by the maintenance of the required particle size in the case of dispersions, and by the use of surfactants.

[0156] These compositions may also contain adjuvants such as preservatives, wetting agents, emulsifying agents and dispersing agents. Prevention of the action of microorganisms upon the subject compounds may be ensured by the inclusion of various antibacterial and antifungal agents, for example, paraben, chlorobutanol, phenol sorbic acid, and the like. It may also be desirable to include isotonic agents, such as sugars, sodium chloride, and the like into the compositions. In addition, prolonged absorption of the injectable pharmaceutical form may be brought about by the inclusion of agents which delay absorption such as aluminum monostearate and gelatin.

[0157] In some cases, in order to prolong the effect of a drug, it is desirable to slow the absorption of the drug from subcutaneous or intramuscular injection. This may be accomplished by the use of a liquid suspension of crystalline or amorphous material having poor water solubility. The rate of absorption of the drug then depends upon its rate of dissolution which, in turn, may depend upon crystal size and crystalline form. Alternatively, delayed absorption of a parenterally-administered drug form is accomplished by dissolving or suspending the drug in an oil vehicle.

[0158] Injectable depot forms are made by forming microencapsule matrices of the subject compounds (e.g., ASO molecules) in biodegradable polymers such as polylactide-polyglycolide. Depending on the ratio of drug to polymer, and the nature of the particular polymer employed, the rate of drug release can be controlled. Examples of other biodegradable polymers include poly(orthoesters) and poly(anhydrides). Depot injectable formulations are also prepared by entrapping the drug in liposomes or microemulsions which are compatible with body tissue.

[0159] When the compounds (e.g., ASO molecules) of the present disclosure are administered as pharmaceuticals, to humans and animals, they can be given per se or as a pharmaceutical composition containing, for example, 0.1 to 99% (more preferably, 10 to 30%) of active ingredient in combination with a pharmaceutically acceptable carrier.

### Methods of Treatment and Administration

[0160] The ASO molecules of the present disclosure may be used to treat or prevent a disease in a subject in need thereof. In one aspect, the present disclosure provides methods of treating or preventing a disease in a subject in need thereof comprises administering to the subject any of the ASO molecules disclosed herein. In one aspect, the present disclosure provides methods of treating or preventing a disease in a subject in need thereof comprises administering to the subject any of the compositions disclosed herein.

[0161] In some embodiments of the disclosed methods and uses, the disease is a respiratory disease. In some embodiments, the respiratory disease is a viral infection. In some embodiments, the respiratory disease is viral pneumonia. In some embodiments, the respiratory disease is an acute respiratory infection. In some embodiments, the respiratory disease is a cold. In some embodiments, the respiratory disease is severe acute respiratory syndrome (SARS). In some embodiments, the respiratory disease is Middle East respiratory syndrome (MERS). In some embodiments, the disease is coronavirus disease 2019 (COVID-19). In some embodiments, the respiratory disease can include one or more symptoms selected from coughing, sore throat, runny nose, sneezing, headache, fever, shortness of breath, myalgia, abdominal pain, fatigue, difficulty breathing, persistent chest pain or pressure, difficulty waking, loss of smell and taste, muscle or joint pain, chills, nausea or vomiting, nasal congestion, diarrhea, haemoptysis, conjunctival congestion, sputum production, chest tightness, and palpitations. In some embodiments, the respiratory disease can include complications selected from sinusitis, otitis media, pneumonia, acute respiratory distress syndrome, disseminated intravascular coagulation, pericarditis, and kidney failure. In some embodiments, the respiratory disease is idiopathic.

[0162] In some embodiments, the subject is a mammal. In some embodiments, the subject is a human. In some embodiments, the subject is a non-human primate. In some embodiments, the subject is a cat. In some embodiments, the subject is a camel. In preferred embodiments in which the subject is a human, the subject may be at least 40 years old, at least 45 years old, at least 50 years old, at least 55 years old, at least 60 years old, at least 65 years old, at least 70 years old, at least 75 years old, or at least 80 years old or older. In some embodiments, the subject is a pediatric subject (i.e., less than 18 years old).

[0163] The preparations (e.g., ASO molecules or pharmaceutical compositions thereof) of the present disclosure may be given parenterally, topically, or rectally or administered in the form of an inhalant. They are, of course, given in forms suitable for each administration route. For example, they are administered in tablets or capsule form, administration by injection, infusion, or inhalation; topical by lotion or ointment; rectal by suppositories. Injection, infusion, or inhalation are preferred.

[0164] These compounds may be administered to humans and other animals for therapy or as a prophylactic by any suitable route of administration, including nasally (as by, for example, a spray), rectally, intravaginally, parenterally, intracisternally and topically, as by powders, ointments or drops, including buccally and sublingually. In some embodiments, the compounds or compositions are inhaled, as by, for example, an inhaler, a nebulizer, or in an aerosolized form.

[0165] Regardless of the route of administration selected, the compounds (e.g., ASO molecules) of the present disclosure, which may be used in a suitable hydrated form, and/or the pharmaceutical compositions of the present disclosure, are formulated into pharmaceutically-acceptable dosage forms by conventional methods known to those of skill in the art.

[0166] In some embodiments, the present disclosure provides methods of treating or preventing a coronavirus infection, comprising administering to a subject in need thereof a therapeutically effective amount of one or more of the ASOs or a pharmaceutical composition as disclosed herein. In some embodiments, the coronavirus infection is selected from the group consisting of Middle East Respiratory Syndrome (MERS), Severe Acute Respiratory Syndrome (SARS), and COVID-19. In some embodiments, the subject has been treated with one or more additional coronavirus treatment agents. In some embodiments, the subject is concurrently treated with one or more additional coronavirus treatment agents.

[0167] Actual dosage levels of the active ingredients (e.g., ASO molecules) in the pharmaceutical compositions of this disclosure may be varied so as to obtain an amount of the active ingredient which is effective to achieve the desired therapeutic response for a particular patient, composition, and mode of administration, without being toxic to the patient.

[0168] The selected dosage level will depend upon a variety of factors including the activity of the particular compound (e.g., ASO molecule) of the present disclosure employed, or the ester, salt or amide thereof, the route of administration, the time of administration, the rate of excretion or metabolism of the particular compound being employed, the rate and extent of absorption, the duration of the treatment, other drugs, compounds and/or materials used in combination with the particular compound employed, the age, sex, weight, condition, general health and prior medical history of the patient being treated, and like factors well known in the medical arts.

[0169] A physician or veterinarian having ordinary skill in the art can readily determine and prescribe the effective amount of the pharmaceutical composition required. For example, the physician or veterinarian could start doses of the compounds (e.g., ASO molecules) of the disclosure employed in the pharmaceutical composition at levels lower than that required in order to achieve the desired therapeutic effect and gradually increase the dosage until the desired effect is achieved.

[0170] In general, a suitable daily dose of a compound (e.g., ASO molecule) of the disclosure is the amount of the compound that is the lowest dose effective to produce a therapeutic effect. Such an effective dose generally depends upon the factors described above. Preferably, the compounds are administered at about 0.01 mg/kg to about 200 mg/kg, more preferably at about 0.1 mg/kg to about 100 mg/kg, even more preferably at about 0.5 mg/kg to about 50 mg/kg. In some embodiments, the compound is administered at a dose equal to or greater than 0.01, 0.02, 0.03, 0.04, 0.05, 0.06, 0.07, 0.08, 0.09, 0.10, 0.11, 0.12, 0.13, 0.14, 0.15, 0.16, 0.17, 0.18, 0.19, 0.20, 0.21, 0.22, 0.23, 0.24, 0.25, 0.26, 0.27, 0.28, 0.29, 0.30, 0.35, 0.40, 0.45, 0.50, 0.55, 0.60, 0.65, 0.7, 0.75, 0.8, 0.85, 0.9, 0.95, or 1 mg/kg. In some embodiments, the compound is administered at a dose equal to or less than 200, 190, 180, 170, 160, 150, 140, 130, 120, 110, 100, 95, 90, 85, 80, 75, 70, 65, 60, 55, 50, 45, 40, 35, 30, 25, 20, or 15 mg/kg. In some embodiments, the total daily dose of the compound is equal to or greater than 10, 15, 20, 25, 30, 35, 40, 45, 50, 55, 60, 65, 70, 75, 80, 85, 90, 95, 100, 105, 110, 115, 120, 125, 130, 135, 140, 145, 150, 155, 160, 165, 170, 175, 180, 185, 190, 195, or 100 mg.

[0171] The subject of the described methods may be a mammal, and it includes humans and non-human mammals. In some embodiments, the subject is a human, such as an adult human.

[0172] The disclosed ASO can be administered alone or in combination with one or more additional coronavirus treatment agents and/or antiviral agents. The additional coronavirus treatment agent and/or antiviral may be a small molecule (e.g., a nucleoside analog or a protease inhibitor) or a biologic (e.g., an antibody or peptide). Examples of suitable coronavirus treatment agents include, but are not limited to, remdesivir, favipiravir, molnupiravir, dexamethasone, bamlanivimab, casirivimab, imdevimab, convalescent plasma, and interferons. Examples of suitable antiviral agents include, but are not limited to, baloxavir marboxil, oseltamivir, anamivir, vidarabine, acyclovir, ganciclovir, zidovudine, didanosine, zalcitabine, lamivudine, saquinavir, ritonavir, indinavir, nelfinavir, ribavirin, amantadine, rimantadine, remdesivir, favipiravir, and molnupiravir.

[0173] When the compounds (e.g., ASO molecules) described herein are co-administered with another active agent, the effective amount may be less than when the compound is used alone.

[0174] If desired, the effective daily dose of the active compound (e.g., ASO molecule) may be administered as two, three, four, five, six or more sub-doses administered separately at appropriate intervals throughout the day, optionally, in unit dosage forms. Preferred dosing is one administration per day. In some embodiments, the compound is administered at least 1, 2, 3, 4, 5, 6, 7, 8, 9, 10, 11, 12, 13, 14, 15, 16, 17, 18, 19, 20, or 21 times a week. In some embodiments, the compound is administered at least 1, 2, 3, 4, 5, 6, 7, 8, 9, 10, 11, 12, 13, 14, 15, 16, 17, 18, 19, 20, or 21 times a month. In some embodiments, the compound is administered once every 1, 2, 3, 4, 5, 6, 7, 8, 9, 10, 11, 12, 13, 14, 15, 16, 17, 18, 19, 20, or 21 days. In some embodiments, the compound is administered once every 1, 2, 3, 4, 5, 6, 7, or 8 weeks.

### Examples

[0175] The following examples illustrate certain embodiments of the present disclosure to aid the skilled person in practicing the disclosure. Accordingly, the examples are in no way considered to limit the scope of the disclosure.

### Example 1: ASO Synthesis

[0176] Gapmer ASO Sequences

[0177] The DNA, 2′-O-Me, 2′-O-methoxyethylribose (2′-MOE) and LNA phosphoramidite monomers were procured from commercially available sources (Thermo Fischer Scientific or Hongene Biotech USA Inc.). All the monomers were dried in vacuum desiccator with desiccants (P₂O₅, RT 24h). Universal solid supports (CPG) attached were obtained from ChemGenes corporation. The chemicals and solvents for synthesis workflow were purchased from VWR/Sigma commercially available sources and used without any purification or treatment. Solvent (acetonitrile) and solutions (amidite and activator) were stored over molecular sieves during synthesis.

[0178] The control and target oligonucleotide sequences were synthesized on an Expedite 8909 synthesizer using the standard cycle written by the manufacturer with modifications to a few wait steps and modified coupling steps. The solid support was controlled pore glass and the monomers contained standard protecting groups. Each chimeric oligonucleotide was individually synthesized using commercially available 5′-O-(4,4′-dimethoxytrityl)-3′-O-(2-cyanoethyl-N, N-diisopropyl) DNA, 2′-OMe, 2′-MOE and/or LNA phosphoramidite monomers of 6-N-benzoyladenosine (A^{Bz}), 4-N-acetylcytidine (C^{Ac}), 4-N-5-methyl acetylcytidine (5m C^{Ac}), 2-N-isobutyrylguanosine (G^{iBu}), and Uridine (U) or Thymidine (T), according to standard solid phase Phosphoramidite synthesis protocols. The 2′-O-Me-2,6-diaminopurine phosphoramidite was purchased from Glen Research. The phosphoramidites were prepared as 0.1 M solutions in anhydrous acetonitrile. 5-Ethylthiotetrazole was used as activator, 3% dichloroacetic acid in dichloromethane was used to detritylate, acetic anhydride in THF and 16% N-methylimidazole in THF were used to cap, and DDTT ((dimethylamino-methylidene)amino)-3H-1,2,4-dithiazaoline-3-thione was used as the sulfur-transfer agent for the synthesis of oligoribonucleotide phosphorothioates. An extended coupling of 0.1M solution of phosphoramidite in CH₃CN in the presence of 5-(ethylthio)-1H-tetrazole activator to a solid bound oligonucleotide followed by extended capping, oxidation and deprotection afforded modified oligonucleotides. The stepwise coupling efficiency of all modified phosphoramidites was more than 98.5%.

[0179] Deprotection and cleavage from the solid support was achieved with mixture of ammonia methylamine (1:1, AMA) for 15 min at 65° C., when the universal linker was used, the deprotection was left for 90 min at 65° C. or solid supports were heated with aqueous ammonia (28%) solution at 55° C. for 8 h to deprotect the base labile protecting groups.

[0180] After filtering to remove the solid support, the deprotection solution was removed under vacuum in a GeneVac centrifugal evaporator.

[chemical structure]

[chemical structure]

The 2′-MOE phosphoramidites

[chemical structure]

The Locked nucleic acid (LNA) phosphoramidite

[chemical structure]

[0181] Modified Gapmer Sequences

[0182] The AmNA (N-Me)-T, AmNA (N-Me)-4-N-benzoyl (5m) cytidine ((5m) C^{Bz}), AmNA (N-Me)-4-N-benzoylcytidine (A^{Bz}), and AmNA (N-Me)-2-N-pac (G^{pac}), were purchased from Luxna Biotech, whereas scp-BNA-T, scp-BNA-6-N-benzoyladenosine (A^{Bz}), scp-BNA-4-N-benzoyl-5 methyl cytidine ((5m) C^{Bz}), scp-BNA-2-N-iguanosine (G^{iBu}) phosphoramidite monomers synthesized by following the procedure described in references (Takao Yamaguchi, Masahiko Horiba and Satoshi Obika; Chem. Commun., 2015, 51, 9737-9740; Masahiko Horiba, Takao Yamaguchi, and Satoshi Obika; Journal of Organic Chemistry, 2016, 81, 11000-11008). All the monomers were dried in a vacuum desiccator with desiccants (KOH and P₂O₅, at room temperature for 24 hours). In the case of AmNA(N-Me)-PS-DNA-PS and scp-BNA-PS-DNA-PS, modifications the synthesis was carried out on a 1 μM scale in a 3′ to 5′ direction with the phosphoramidite monomers diluted to a concentration of 0.12 M in anhydrous CH₃CN in the presence of 0.3 M 5-(benzylthio)-1H-tetrazole activator (coupling time 16 min) to a solid bound oligonucleotide followed by modified capping, oxidation and deprotection afforded modified oligonucleotides. The stepwise coupling efficiency of all modified phosphoramidites was more than 97%. The DDTT (dimethylamino-methylidene) amino)-3H-1,2,4-dithiazaoline-3-thione was used as the sulfur-transfer agent for the synthesis of oligoribonucleotide phosphorothioates. Oligonucleotide-bearing solid supports were washed with 20% DEA solution in acetonitrile for 15 min then column was washed thoroughly with MeCN. The support was heated at 65° C. with diisopropylamine:water:methanol (1:1:2) for 8 h in heat block to cleavage from support and deprotect the base labile protecting groups.

### AmNA (N-Me) Monomers

[chemical structure]

scp-BNA monomers

[chemical structure]

[0184] Quantitation of Crude Oligomer or Raw Analysis

[0185] Samples were dissolved in deionized water (1.0 mL) and quantitated as follows: Blanking was first performed with water alone on Nanodrop UV spectrophotometer. Nano Drop instruments can measure a wide concentration range of nucleic acids through use of multiple path lengths. The most accurate quantification results can be achieved by measuring diluted oligonucleotides with an absorbance at 260 nm. The crude material is stored at −20° C.

[0186] Crude HPLC/LC-MS Analysis

[0187] The 0.1 OD of the crude samples were used for crude MS analysis. After confirming the crude LC-MS data, then the purification step was performed.

[0188] HPLC Purification

[0189] The Phosphodiester (PO), Phosphorothioate (PS) and chimeric modified oligonucleotides were purified by anion-exchange HPLC. The buffers were 20 mM sodium phosphate in 10% CH₃CN, pH 8.5 (buffer A) and 20 mM sodium phosphate in 10% CH₃CN, 1.8 M NaBr, pH 8.5 (buffer B). Fractions containing full-length oligonucleotides were pooled, desalted and lyophilized.

[0190] The lipid conjugated oligonucleotides were purified by an in-house packed RPC-Source15 reverse-phase column. The buffers were 20 mM sodium acetate in 10% CH₃CN, (buffer A) and CH₃CN (buffer B). Fractions containing full-length oligonucleotides were pooled, desalted and lyophilized.

[0191] Desalting of Purified Oligomer

[0192] The purified dry oligomer was then desalted using Sephadex G-25 M (Amersham Biosciences). The cartridge was conditioned with 10 mL of deionized water thrice. The purified oligonucleotide dissolved thoroughly in 2.5 mL deionized water was applied to the cartridge with very slow drop wise elution. The salt free oligomer was eluted with 3.5 ml deionized water directly into a screw cap vial.

[0193] Final HPLC and Electrospray LC/MS Analysis

[0194] Approximately 0.10 OD of oligomer is dissolved in water and then pipetted in special vials for IEX-HPLC and LC/MS analysis. Analytical HPLC and ES LC-MS established the integrity of the chimeric oligonucleotides.

### Example 2: Human Beta-Coronavirus OC43 Transfection-Based Antiviral Assay in HeLa Cells

[0195] The human beta-coronavirus OC43 was purchased from ATCC (Manassas, Va.) and propagated using HCT-8 human colorectal epithelial cells (ATCC). HeLa human cervical epithelial cells (ATCC) was used as susceptible host cell lines and were cultured using EMEM media, supplemented with 10% fetal bovine serum (FBS), 1% (v/v) penicillin/streptomycin (P/S), 1% (v/v) HEPES and 1% (v/v) cellgro Glutagro™ supplement (all Corning, Manassas, Va.) at 37° C. For the OC43 antiviral assay, 1.5×10⁴ HeLa cells per well were plated in 100 μl complete media in white 96-well plates with clear flat bottom at 37° C. for up to 24 hours to facilitate attachment and allow cells to recover from seeding stresses. Next day, HeLa cells were inoculated with 100 ul of HCoV-OC43 stock diluted to a concentration known to produce optimal cytopathic effect, inducing 80-90% reduction in cell viability. Cells were incubated at 33° C. in a humidified atmosphere 5% CO₂ for about 2.5-3 hrs in 2% FBS assay media (EMEM, 2% FBS, 1% P/S, 1% cellgro Glutagro™ supplement, 1% HEPES). Cells were then washed twice with phosphate-buffered saline (PBS) and EMEM supplemented with 2% FBS was added to cells. At the same time, cells were also transfected with test antisense oligonucleotides (ASO) in duplicates using 0.3 ul/well RNAiMAX transfection reagent (1:1 ratio; Invitrogen) according to the manufacturer's protocol and incubated for 48 hrs at 33° C. in a humidified atmosphere 5% CO₂; each plate contains uninfected control wells as well as virus-infected mock transfection wells that were not treated with oligonucleotides. The final concentration of each ASO was 1 μM. Supernatant was collected 48 hrs post incubation for extracellular viral RNA quantification via quantigene bDNA assay (Invitrogen probe set and reagents) according to manufacturer's protocol. Data was collected on Luminometer (Envision plate reader) and reported as antiviral % inhibition at 1 μM was calculated as follows: 100×(oligonucleotide/infected−uninfected)/(infected/untreated−uninfected). Cytotoxicity plates without the addition of OC43 virus were carried out with the same assay format on a different day. After 48 hrs incubation, cells were assayed and lysed with 100 μl cell-titer-glo reagent (Promega, Madison, Wis.) and incubated for at least 10 min at room temperature prior to measuring luminescence. Luminescence was measured on a Perkin Elmer (Waltham, Mass.) Envision plate reader.

[0196] The results of these assays are shown in Table 4 below. The data was reported as viability relative to no-drug control (mock transfection using 0.3 ul/well RNAiMAX transfection reagent).

TABLE 4
Biological Activity of Exemplary ASOs
in Antiviral Assay in HeLa Cells

Human beta-coronavirus OC43 transfection-
based antiviral assay in HeLa cells

| | % Virus | % Cell |
|---|---|---|
| | inhibition | Viability |
| | at 1 uM; | at 1 Um; |
| | A: >80%; | A: >80%; |
| | B: 50-79%, | B: 50-79%, |
| Name | C: <50% | C: <50% |
| ASO-000 | C | B |
| ASO-001 | n.d. | A |
| ASO-002 | C | B |
| ASO-003 | A | C |
| ASO-004 | B | C |
| ASO-005 | A | C |
| ASO-006 | B | C |
| ASO-007 | C | C |
| ASO-008 | C | C |
| ASO-009 | B | B |
| ASO-010 | B | C |
| ASO-011 | A | C |
| ASO-012 | B | C |
| ASO-013 | C | B |
| ASO-014 | A | C |
| ASO-015 | C | A |
| ASO-016 | B | C |
| ASO-017 | B | C |
| ASO-018 | C | C |
| ASO-019 | C | C |
| ASO-020 | C | C |
| ASO-021 | A | C |
| ASO-022 | C | A |
| ASO-023 | C | B |
| ASO-024 | B | C |
| ASO-025 | A | C |
| ASO-026 | A | C |
| ASO-027 | A | C |
| ASO-028 | A | C |
| ASO-029 | B | C |
| ASO-030 | A | C |
| ASO-031 | A | C |
| ASO-032 | C | C |
| ASO-033 | B | C |
| ASO-034 | B | C |
| ASO-035 | C | B |
| ASO-036 | C | B |
| ASO-037 | n.d. | n.d. |
| ASO-038 | B | B |
| ASO-039 | C | A |
| ASO-040 | A | C |
| ASO-041 | A | C |
| ASO-042 | A | C |
| ASO-043 | A | C |
| ASO-044 | A | C |
| ASO-045 | C | A |
| ASO-046 | B | B |
| ASO-047 | B | B |
| ASO-048 | A | C |
| ASO-049 | B | C |
| ASO-050 | A | C |
| ASO-051 | A | C |
| ASO-052 | A | C |
| ASO-053 | A | C |
| ASO-054 | A | B |
| ASO-055 | A | C |
| ASO-056 | A | C |
| ASO-057 | A | C |
| ASO-058 | C | A |
| ASO-059 | B | A |
| ASO-060 | A | C |
| ASO-061 | A | C |
| ASO-062 | A | C |
| ASO-063 | A | C |
| ASO-064 | A | C |
| ASO-065 | A | C |
| ASO-066 | A | C |
| ASO-067 | A | C |
| ASO-068 | n.d. | n.d. |
| ASO-069 | A | C |
| ASO-070 | A | C |
| ASO-071 | C | B |
| ASO-072 | A | C |
| ASO-073 | A | C |
| ASO-074 | n.d. | n.d. |
| ASO-075 | C | B |
| ASO-076 | B | C |
| ASO-077 | A | C |
| ASO-078 | C | B |
| ASO-079 | A | C |
| ASO-080 | A | C |
| ASO-081 | A | C |
| ASO-082 | A | C |
| ASO-083 | B | C |
| ASO-084 | A | C |
| ASO-085 | A | C |
| ASO-086 | A | C |
| ASO-087 | A | C |
| ASO-088 | A | C |
| ASO-089 | A | C |
| ASO-090 | C | A |
| ASO-091 | B | C |
| ASO-092 | C | A |
| ASO-093 | A | C |
| ASO-094 | C | A |
| ASO-095 | A | C |
| ASO-096 | A | C |
| ASO-097 | C | A |
| ASO-098 | A | B |
| ASO-099 | A | C |
| ASO-100 | B | B |
| ASO-101 | A | C |
| ASO-102 | A | C |
| ASO-103 | A | C |
| ASO-104 | A | C |
| ASO-105 | A | C |
| ASO-106 | C | A |
| ASO-107 | C | B |
| ASO-108 | A | C |
| ASO-109 | A | C |
| ASO-110 | A | C |
| ASO-111 | A | C |
| ASO-112 | A | C |
| ASO-113 | A | C |
| ASO-114 | A | C |
| ASO-115 | A | C |
| ASO-116 | A | C |
| ASO-117 | n.d. | n.d. |
| ASO-118 | n.d. | n.d. |
| ASO-119 | n.d. | n.d. |
| ASO-120 | A | B |
| ASO-121 | A | B |
| ASO-122 | A | C |
| ASO-123 | A | C |
| ASO-124 | A | C |
| ASO-125 | A | C |
| ASO-126 | A | C |
| ASO-127 | A | C |
| ASO-128 | n.d. | n.d. |
| ASO-129 | C | A |
| ASO-130 | A | C |
| ASO-131 | A | C |
| ASO-132 | A | B |
| ASO-133 | C | A |
| ASO-134 | A | C |
| ASO-135 | A | C |
| ASO-136 | A | C |
| ASO-137 | A | C |
| ASO-138 | B | B |
| ASO-139 | A | C |
| ASO-140 | A | C |
| ASO-141 | A | C |
| ASO-142 | B | B |

### Example 3: Reporter Plasmid Luciferase and Cytotoxicity Assay in Cos7 Cells

[0197] COS-7 monkey fibroblast cells (ATCC, CRL-1651) were seeded into 96-well culture plates at 15.0×10⁴ cells/well and cultured in Dulbecco's Modified Eagle's Medium (DMEM; Hyclone, SH30022) supplemented with 10% fetal bovine serum (FBS; Sigma-Aldrich, F4135) and 1% Penicillin-Streptomycin (P/S; Corning, 30-002-CI) at 37° C. and 5% CO₂. After 6 hrs of incubation, cells were transiently transfected with psiCHECK2-SARS-CoV-2 plasmid (custom-synthesized by Genscript) at 50 ng/well using 0.3 μL of Lipofectamine 3000 transfection reagent (1:1 reagent/psi-CHECK2-SARS-CoV-2 DNA ratio; Invitrogen) in Opti-MEM (Invitrogen, 11058-021) according to the manufacturer's protocol. After overnight incubation, the medium was removed and replaced with 100 ul fresh growth media. Test oligonucleotides along with appropriate controls (Ambion siRNAs, ThermoFisher) were serially diluted in Opti-MEM (Invitrogen, 11058-021). Cells were then transfected with test siRNAs in duplicates using 0.3 ul/well RNAiMAX transfection reagent (1:1 ratio; Invitrogen) according to the manufacturer's protocol. After approximately 48 hrs, the culture plates were equilibrated to RT, 100 μL of Dual-Luciferase Reporter Assay reagent (Promega, E6120) were added to each well according to manufacturer's protocol. Luminescence was measured on an Envision plate reader (Perkin Elmer). The results were then quantified by calculating the ratio of renilla to firefly luciferase expression for each of the duplicates and reported as percent inhibition of luciferase activity relative to no-drug control (mock transfection with psiCHECK2-SARS-CoV-2 plasmid) and dose-response curves were fitted by non-linear regression with variable slope (four parameters). Statistical analysis was performed in GraphPad Prism 8.3.1 (San Diego, Calif.) and the EC₅₀ was calculated which is the predicted oligonucleotide concentration corresponding to a 50% inhibition of the luciferase activity. The assay was repeated with a different set of plates and cytotoxicity of test siRNAs was assessed 48 hrs post treatment of COS-7 cells. The cells were lysed and assayed with Cell-Titer Glo reagent (Promega) according to the manufacturer's protocol.

[0198] The results of these assays are shown in Table 5 below in the EC₅₀ column. The data was reported as % viability relative to no-drug control (mock transfection with psiCHECK2-SARS-CoV-2 plasmid) and dose-response curves were fitted by non-linear regression with variable slope (four parameters) using GraphPad prism software version 8.3.1.

### Example 4: Cytotoxicity Assessment in A549 Cells

[0199] A549 human lung epithelial cells (ATCC, CCL-185) were seeded into 96-well F-bottom white-walled culture plates at 1.20×10⁴ cells/well and cultured in 100 ul of Ham's F12 1× (Modified) WITH L-glutamine (Corning; 10-080-CM) supplemented with 10% fetal bovine serum (FBS; Sigma-Aldrich, F4135) and 1% Penicillin-Streptomycin (P/S; Corning, 30-002-CI) at 37° C. and 5% CO₂ for up to 24 hrs to facilitate attachment. After overnight incubation, the medium was removed and replaced with 100 ul fresh growth media with 2% FBS. Test siRNAs or ASOs along with appropriate controls were serially diluted in Opti-MEM (Invitrogen, 11058-021). Cells were then transfected with test siRNAs or ASOs in duplicates using 0.2 ul/well RNAiMAX transfection reagent (1:1 ratio; Invitrogen) according to the manufacturer's protocol. After approximately 48 hrs, the culture plates were equilibrated to RT. Cells treated with siRNAs were lysed and assayed with 100 ul/well Cell-Titer Glo reagent (Promega) according to the manufacturer's protocol. After incubation for at least 10 min at room temperature, luminescence was measure using Envision plate reader (Perkin Elmer). The data was reported as % viability relative to no-drug control (mock transfection with psiCHECK2-SARS-CoV-2 plasmid) and dose-response curves were fitted by non-linear regression with variable slope (four parameters) using GraphPad prism software version 8.3.1. On the other hand, cells treated with ASOs were lysed and assayed for detection of caspase-3 and -7 activities. 1:1 ratio of Caspase-Glo 3/7 reagent volume (Promega) was added to sample volume, plate contents were gently mixed using a plate-shaker at 300-500 rpm for 30 seconds and were incubated for approximately 1 hr at room temperature before recording luminescence.

[0200] The results of these assays are shown in Table 5 below in the CC₅₀ column. Data was collected on Luminometer (Envision plate reader) and reported as % apoptosis relative to no-drug control (mock transfection with 0.2 ul of RNAiMAX transfection reagent), subtracting background signal from every well. Increased caspase activation with cytotoxicity indicated cytotoxicity is the result of apoptosis; dose-response curves were fitted by non-linear regression with variable slope (four parameters) using GraphPad prism software version 8.3.1.

TABLE 5
EC₅₀ and CC₅₀ Data for Exemplary ASOs

| | EC₅₀ in psiCHECK2 | CC₅₀ (apoptosis) |
|---|---|---|
| | reporter assay; | in A549 cells; |
| | A: <5 nM; | A: >100 nM CC₅₀; |
| | B: 5.1-10 nM; | B: 50-100 nM CC₅₀; |
| Name | C: >10 nM | C: <50 nM CC₅₀ |
| ASO-143 | B | A |
| ASO-144 | B | A |
| ASO-145 | B | B |
| ASO-146 | A | B |
| ASO-147 | B | A |
| ASO-148 | C | C |
| ASO-149 | A | C |
| ASO-150 | B | C |
| ASO-151 | B | C |
| ASO-152 | B | C |
| ASO-153 | C | A |
| ASO-154 | B | B |
| ASO-155 | A | B |
| ASO-156 | C | B |
| ASO-157 | C | A |
| ASO-158 | A | n.d. |
| ASO-159 | C | n.d. |
| ASO-160 | C | n.d. |
| ASO-161 | C | n.d. |
| ASO-162 | C | n.d. |
| ASO-163 | A | A |
| ASO-164 | B | A |
| ASO-165 | C | A |
| ASO-166 | B | A |
| ASO-167 | B | C |
| ASO-168 | C | C |
| ASO-169 | C | A |
| ASO-170 | C | C |
| ASO-171 | C | C |
| ASO-172 | A | C |
| ASO-173 | B | A |
| ASO-174 | C | B |
| ASO-175 | B | B |
| ASO-176 | C | A |
| ASO-177 | A | A |
| ASO-178 | A | C |
| ASO-179 | C | A |

[0201] All patents and publications mentioned in the specification are indicative of the levels of those of ordinary skill in the art to which the disclosure pertains. All patents and publications are herein incorporated by reference to the same extent as if each individual publication was specifically and individually indicated to be incorporated by reference.

[0202] Further, one skilled in the art readily appreciates that the present disclosure is well adapted to carry out the objects and obtain the ends and advantages mentioned, as well as those inherent therein. Modifications therein and other uses will occur to those skilled in the art. These modifications are encompassed within the spirit of the disclosure and are defined by the scope of the claims, which set forth non-limiting embodiments of the disclosure.

TABLE 2
Exemplary Coronavirus Genomes

| SEQ ID NO: | Description | Sequence |
|---|---|---|
| 5535 | SARS-CoV-2 genome | attaaaggtttataccttcccaggtaacaaaccaaccaactttcgatctcttgtagatctgttctctaaacgaactttaaaatctgtgtggctgtcact |
| | Genbank Accession No. NC_045512.2 | cggctgcatgcttagtgcactcacgcagtataattaataactaattactgtcgttgacaggacacgagtaactcgtctatcttctgcaggctgcttacg |
| | | gtttcgtccgtgttgcagccgatcatcagcacatctaggtttcgtccgggtgtgaccgaaaggtaagatggagagccttgtccctggtttcaacgagaa |
| | | aacacacgtccaactcagtttgcctgttttacaggttcgcgacgtgctcgtacgtggctttggagactccgtggaggaggtcttatcagaggcacgtca |
| | | acatcttaaagatggcacttgtggcttagtagaagttgaaaaaggcgttttgcctcaacttgaacagccctatgtgttcatcaaacgttcggatgctcg |
| | | aactgcacctcatggtcatgttatggttgagctggtagcagaactcgaaggcattcagtacggtcgtagtggtgagacacttggtgtccttgtccctca |
| | | tgtgggcgaaataccagtggcttaccgcaaggttcttcttcgtaagaacggtaataaaggagctggtggccatagttacggcgccgatctaaagtcatt |
| | | tgacttaggcgacgagcttggcactgatccttatgaagattttcaagaaaactggaacactaaacatagcagtggtgttacccgtgaactcatgcgtga |
| | | gcttaacggaggggcatacactcgctatgtcgataacaacttctgtggccctgatggctaccctcttgagtgcattaaagaccttctagcacgtgctgg |
| | | taaagcttcatgcactttgtccgaacaactggactttattgacactaagaggggtgtatactgctgccgtgaacatgagcatgaaattgcttggtacac |
| | | ggaacgttctgaaaagagctatgaattgcagacaccttttgaaattaaattggcaaagaaatttgacaccttcaatggggaatgtccaaattttgtatt |
| | | tcccttaaattccataatcaagactattcaaccaagggttgaaaagaaaaagcttgatggctttatgggtagaattcgatctgtctatccagttgcgtc |
| | | accaaatgaatgcaaccaaatgtgcctttcaactctcatgaagtgtgatcattgtggtgaaacttcatggcagacgggcgattttgttaaagccacttg |
| | | cgaattttgtggcactgagaatttgactaaagaaggtgccactacttgtggttacttaccccaaaatgctgttgttaaaatttattgtccagcatgtca |
| | | caattcagaagtaggacctgagcatagtcttgccgaataccataatgaatctggcttgaaaaccattcttcgtaagggtggtcgcactattgcattgga |
| | | ggctgtgtgttctcttatgttggttgccataacaagtgtgcctattgggttccacgtgctagcgctaacataggttgtaaccatacaggtgttgttgga |
| | | gaaggttccgaaggtcttaatgacaaccttcttgaaatactccaaaaagagaaagtcaacatcaatattgttggtgactttaaacttaatgaagagatc |
| | | gccattattttggcatctttttctgcttccacaagtgcttttgtggaaactgtgaaaggtttggattataaagcattcaaacaaattgttgaatcctgt |
| | | ggtaattttaaagttacaaaaggaaaagctaaaaaaggtgcctggaatattggtgaacagaaatcaatactgagtcctattatgcatttgcatcagagg |
| | | ctgctcgtgttgtacgatcaattttctcccgcactcttgaaactgctcaaaattctgtgcgtgttttacagaaggccgctataacaatactagatggaa |
| | | tttcacagtattcactgagactcattgatgctatgatgttcacatctgatttggctactaacaatctagttgtaatggcctacattacaggtggtgttg |
| | | ttcagttgacttcgcagtggctaactaacatctttggcactgtttatgaaaaactcaaacccgtccttgattggcttgaagagaagtttaaggaaggtg |
| | | tagagtttcttagagacggttgggaaattgttaaatttatctcaacctgtgcttgtgaaattgtcggtggacaaattgtcacctgtgcaaaggaaatta |
| | | aggagagtgttcagacattattaagcttgtaaataaatttttggctttttgtgtgctgactctatcattattggtggagctaaacttaaagccttgaat |
| | | ttaggtgaaacatttgtcacgcactcaaagggattgtacagaaagtgtgttaaatccagagaagaaactggcctactcatgcctctaaaagccccaaaa |
| | | gaaattatcttcttagagggagaaacacttcccacagaagtgttaacagaggaagttgtcttgaaaactggtgatttacaaccattagaacaacctact |
| | | agtgaagctgttgaagctccattggttggtacaccagtttgtattaacgggcttatgttgctcgaaatcaaagacacagaaaagtactgtgcccttgca |
| | | cctaatatgatggtaacaaacaataccttcacactcaaaggcggtgcaccaacaaaggttacttttggtgatgacactgtgatagaagtgcaaggttac |
| | | aagagtgtgaatatcacttttgaacttgatgaaaggattgataaagtacttaatgagaagtgctctgcctatacagttgaactcggtacagaagtaaat |
| | | gagttcgcctgtgttgtggcagatgctgtcataaaaactttgcaaccagtatctgaattacttacaccactgggcattgatttagatgagtggagtatg |
| | | gctacatactacttatttgatgagtctggtgagtttaaattggcttcacatatgtattgttctttctaccctccagatgaggatgaagaagaaggtgat |
| | | tgtgaagaagaagagtttgagccatcaactcaatatgagtatggtactgaagatgattaccaaggtaaacctttggaatttggtgccacttctgctgct |
| | | cttcaacctgaagaagagcaagaagaagattggttagatgatgatagtcaacaaactgttggtcaacaagacggcagtgaggacaatcagacaactact |
| | | attcaaacaattgttgaggttcaacctcaattagagatggaacttacaccagttgttcagactattgaagtgaatagttttagtggttatttaaaactt |
| | | actgacaatgtatacattaaaaatgcagacattgtggaagaagctaaaaaggtaaaaccaacagtggttgttaatgcagccaatgtttaccttaaacat |
| | | ggaggaggtgttgcaggagccttaaataaggctactaacaatgccatgcaagttgaatctgatgattacatagctactaatggaccacttaaagtgggt |
| | | ggtagttgtgttttaagcggacacaatcttgctaaacactgtcttcatgttgtcggcccaaatgttaacaaaggtgaagacattcaacttcttaagagt |
| | | gcttatgaaaattttaatcagcacgaagttctacttgcaccattattatcagctggtatttttggtgctgaccctatacattattaagagtttgtgtag |
| | | atactgttcgcacaaatgtctacttagctgtattgataaaaatctctatgacaaacttgtttcaagattttggaaatgaagagtgaaaagcaagttgaa |
| | | caaaagatcgctgagattcctaaagaggaagttaagccatttataactgaaagtaaaccttcagttgaacagagaaaacaagatgataagaaaatcaaa |
| | | gcttgtgttgaagaagttacaacaactaggaagaaactaagttcctcacagaaaacttgttactttatattgacattaatggcaatcttcatccagatt |
| | | ctgccactcttgttagtgacattgacatcactttcttaaagaaagatgaccatatatagtgggtgatgttgttcaagagggtgttttaactgctgtggt |
| | | tatacctactaaaaaggctggtggcactactgaaatgctagcgaaagattgagaaaagtgccaacagacaattatataaccacttacccgggtcagggt |
| | | ttaaatggttacactgtagaggaggcaaagacagtgcttaaaaagtgtaaaagtgccttttacattctaccatctattatctctaatgagaagcaagaa |
| | | attcttggaactgtttcttggaatttgcgagaaatgcttgcacatgcagaagaaacacgcaaattaatgcctgtctgtgtggaaactaaagccatagtt |
| | | tcaactatacagcgtaaatataagggtattaaaatacaagagggtgtggttgattatggtgctagattttacttttacaccagtaaaacaactgtagcg |
| | | tcacttatcaacacacttaacgatctaaatgaaactcttgttacaatgccacttggctatgtaacacatggcttaaatttggaagaagctgctcggtat |
| | | atgagatctctcaaagtgccagctacagtttctgtttcttcacctgatgctgttacagcgtataatggttatcttacttcttcttctaaaacacctgaa |
| | | gaacattttattgaaaccatctcacttgctggttcctataaagattggtcctattctggacaatctacacaactaggtatagaatttcttaagagaggt |
| | | gataaaagtgtatattacactagtaatcctaccacattccacctagatggtgaagttatcacctttgacaatcttaagacacttctttattgagagaag |
| | | tgaggactattaaggtgtttacaacagtagacaacattaacctccacacgcaagttgtggacatgtcaatgacatatggacaacagtttggtccaactt |
| | | atttggatggagctgatgttactaaaataaaacctcataattcacatgaaggtaaaacattttatgttttacctaatgatgacactctacgtgttgagg |
| | | cttttgagtactaccacacaactgatcctagttttctgggtaggtacatgtcagcattaaatcacactaaaaagtggaaatacccacaagttaatggtt |
| | | taacttctattaaatgggcagataacaactgttatcttgccactgcattgttaacactccaacaaatagagttgaagtttaatccacctgctctacaag |
| | | atgcttattacagagcaagggctggtgaagctgctaacttttgtgcacttatcttagcctactgtaataagacagtaggtgagttaggtgatgttagag |
| | | aaacaatgagttacttgtttcaacatgccaatttagattcttgcaaaagagtcttgaacgtggtgtgtaaaacttgtggacaacagcagacaaccctta |
| | | agggtgtagaagctgttatgtacatgggcacactttcttatgaacaatttaagaaaggtgttcagataccttgtacgtgtggtaaacaagctacaaaat |
| | | atctagtacaacaggagtcaccttttgttatgatgtcagcaccacctgctcagtatgaacttaagcatggtacatttacttgtgctagtgagtacactg |
| | | gtaattaccagtgtggtcactataaacatataacttctaaagaaactttgtattgcatagacggtgctttacttacaaagtcctcagaatacaaaggtc |
| | | ctattacggatgttttctacaaagaaaacagttacacaacaaccataaaaccagttacttataaattggatggtgttgtttgtacagaaattgacccta |
| | | agttggacaattattataagaaagacaattcttatttcacagagcaaccaattgatcttgtaccaaaccaaccatatccaaacgcaagcttcgataatt |
| | | ttaagtttgtatgtgataatatcaaatttgctgatgatttaaaccagttaactggttataagaaacctgcttcaagagagcttaaagttacatttttcc |
| | | ctgacttaaatggtgatgtggtggctattgattataaacactacacaccacttttaagaaaggagctaaattgttacataaacctattgtttggcatgt |
| | | taacaatgcaactaataaagccacgtataaaccaaatacctggtgtatacgttgtattggagcacaaaaccagttgaaacatcaaattcgtttgatgta |
| | | ctgaagtcagaggacgcgcagggaatggataatcttgcctgcgaagatctaaaaccagtctctgaagaagtagtggaaaatcctaccatacagaaagac |
| | | gttcttgagtgtaatgtgaaaactaccgaagttgtaggagacattatacttaaaccagcaaataatagtttaaaaattacagaagaggttggccacaca |
| | | gatctaatggctgcttatgtagacaattctagtcttactattaagaaacctaatgaattatctagagtattaggtttgaaaaccdtgctactcatggtt |
| | | tagctgctgttaatagtgtccdtgggatactatagctaattatgctaagccttttcttaacaaagttgttagtacaactactaacatagttacacggtg |
| | | tttaaaccgtgtttgtactaattatatgccttatttctttactttattgctacaattgtgtacttttactagaagtacaaattctagaattaaagcatc |
| | | tatgccgactactatagcaaagaatactgttaagagtgtcggtaaattttgtctagaggcttcatttaattatttgaagtcacctaatttttctaaact |
| | | gataaatattataatttggtttttactattaagtgtttgcctaggttattaatctactcaaccgctgattaggtgttttaatgtctaatttaggcatgc |
| | | cttcttactgtactggttacagagaaggctatttgaactctactaatgtcactattgcaacctactgtactggttctataccttgtagtgtttgtctta |
| | | gtggtttagattattagacacctatccttattagaaactatacaaattaccatttcatatttaaatgggatttaactgcttttggcttagttgcagagt |
| | | ggtttttggcatatattcttttcactaggtttttctatgtacttggattggctgcaatcatgcaattgtttttcagctattttgcagtacattttatta |
| | | gtaattcttggcttatgtggttaataattaatcttgtacaaatggccccgatttcagctatggttagaatgtacatcttattgcatcattttattatgt |
| | | atggaaaagttatgtgcatgttgtagacggttgtaattcatcaacttgtatgatgtgttacaaacgtaatagagcaacaagagtcgaatgtacaactat |
| | | tgttaatggtgttagaaggtccttttatgtctatgctaatggaggtaaaggcttttgcaaactacacaattggaattgtgttaattgtgatacattctg |
| | | tgctggtagtacatttattagtgatgaagttgcgagagacttgtcactacagtttaaaagaccaataaatcctactgaccagtcttcttacatcgttga |
| | | tagtgttacagtgaagaatggttccatccatattactttgataaagaggtcaaaagacttatgaaagacattactctctcattttgttaacttagacaa |
| | | cctgagagctaataacactaaaggttcattgcctattaatgttatagtttttgatggtaaatcaaaatgtgaagaatcatctgcaaaatcagcgtagtt |
| | | tactacagtcagcttatgtgtcaacctatactgttactagatcaggcattagtgtctgatgttggtgatagtgcggaagttgcagttaaaatgtttgat |
| | | gcttacgttaatacgttttcatcaacttttaacgtaccaatggaaaaactcaaaacactagttgcaactgcagaagctgaacttgcaaagaatgtgtcc |
| | | ttagacaatgtcttatctacttttatttcagcagctcggcaagggtttgttgattcagatgtagaaactaaagatgttgttgaatgtcttaaattgtca |
| | | catcaatctgacatagaagttactggcgatagttgtaataactatatgctcacctataacaaagttgaaaacatgacaccccgtgaccttggtgcttgt |
| | | attgactgtagtgcgcgtcatattaatgcgcaggtagcaaaaagtcacaacattgattgatatggaacgttaaagatttcatgtcattgtctgaacaac |
| | | tacgaaaacaaatacgtagtgctgctaaaaagaataacttaccttttaagttgacatgtgcaactactagacaagttgttaatgttgtaacaacaaaga |
| | | tagcacttaagggtggtaaaattgttaataattggttgaagcagttaattaaagttacacttgtgttcctttttgttgctgctattttctatttaataa |
| | | cacctgttcatgtcatgtctaaacatactgacttttcaagtgaaatcataggatacaaggctattgatggtggtgtcactcgtgacatagcatctacag |
| | | atacttgttttgctaacaaacatgctgattttgacacatggtttagccagcgtggtggtagttatactaatgacaaagcttgcccattgattgctgcag |
| | | tcataacaagagaagtgggttttgtcgtgcctggtttgcctggcacgatattacgcacaactaatggtgactttttgcatttcttacctagagttttta |
| | | gtgcagttggtaacatctgttacacaccatcaaaacttatagagtacactgactttgcaacatcagcttgtgttttggctgctgaatgtacaattttta |
| | | aagatgcttctggtaagccagtaccatattgttatgataccaatgtactagaaggttctgttgcttatgaaagtttacgccctgacacacgttatgtgc |
| | | tcatggatggctctattattcaatttcctaacacctaccttgaaggttctgttagagtggtaacaacttttgattctgagtactgtaggcacggcactt |
| | | gtgaaagatcagaagctggtgtttgtgtatctactagtggtagatgggtacttaacaatgattattacagatctttaccaggagttttctgtggtgtag |
| | | atgctgtaaatttacttactaatatgtttacaccactaattcaacctattggtgctttggacatatcagcatctatagtagctggtggtattgtagcta |
| | | tcgtagtaacatgccttgcctactattttatgaggtttagaagagcttttggtgaatacagtcatgtagttgcctttaatactttactattccttatgt |
| | | cattcactgtactctgtttaacaccagtttactcattcttacctggtgtttattctgttatttacttgtacttgacattttatcttactaatgatgttt |
| | | cttttttagcacatattcagtggatggttatgttcacacctttagtacctttctggataacaattgcttatatcatttgtatttccacaaagcatttct |
| | | attggttattagtaattacctaaagagacgtgtagtctttaatggtgtttcctttagtacttttgaagaagctgcgctgtgcacctttttgttaaataa |
| | | agaaatgtatctaaagttgcgtagtgatgtgctattacctcttacgcaatataatagatacttagctctttataataagtacaagtattttagtggagc |
| | | aatggatacaactagctacagagaagctgcttgttgtcatctcgcaaaggctctcaatgacttcagtaactcaggttctgatgttattaccaaccacca |
| | | caaacctctatcacctcagctgttttgcagagtggttttagaaaaatggcattcccatctggtaaagttgagggttgtatggtacaagtaacttgtggt |
| | | acaactacacttaacggtctttggcttgatgacgtagtttactgtccaagacatgtgatctgcacctctgaagacatgcttaaccctaattatgaagat |
| | | ttactcattcgtaagtctaatcataatttcttggtacaggctggtaatgttcaactcagggttattggacattctatgcaaaattgtgtacttaagctt |
| | | aaggttgatacagccaatcctaagacacctaagtataagtttgttcgcattcaaccaggacagactttttcagtgttagcttgttacaatggttcacca |
| | | tctggtgtttaccaatgtgctatgaggcccaatttcactattaagggttcattccttaatggttcatgtggtagtgttggttttaacatagattatgac |
| | | tgtgtctctttttgttacatgcaccatatggaattaccaactggagttcatgctggcacagacttagaaggtaacttttatggaccttttgttgacagg |
| | | caaacagcacaagcagctggtacggacacaactattacagttaatgttttagcttggttgtacgctgctgttataaatggagacaggtggtttctcaat |
| | | cgatttaccacaactcttaatgactttaaccttgtggctatgaagtacaattatgaacctctaacacaagaccatgttgacatactaggacctctttct |
| | | gctcaaactggaattgccgttttagatatgtgtgcttcattaaaagaattactgcaaaatggtatgaatggacgtaccatattgggtagtgattattag |
| | | aagatgaatttacaccttttgatgttgttagacaatgctcaggtgttactttccaaagtgcagtgaaaagaacaatcaagggtacacaccactggttgt |
| | | tactcacaattttgacttcacttttagttttagtccagagtactcaatggtctttgttcttttttttgtatgaaaatgcctttttaccttttgctatgg |
| | | gtattattgctatgtctgcttttgcaatgatgtttgtcaaacataagcatgcatttactgtttgtttttgttaccttctcttgccactgtagcttattt |
| | | taatatggtctatatgcctgctagttgggtgatgcgtattatgacatggttggatatggttgatactagtttgtaggttttaagctaaaagactgtgtt |
| | | atgtatgcatcagctgtagtgttactaatccttatgacagcaagaactgtgtatgatgatggtgctaggagagtgtggacacttatgaatgtcttgaca |
| | | ctcgtttataaagtttattatggtaatgattagatcaagccatttccatgtgggctcttataatctctgttacttctaactactcaggtgtagttacaa |
| | | ctgtcatgtttttggccagaggtattgtttttatgtgtgttgagtattgccctattttcttcataactggtaatacacttcagtgtataatgctagttt |
| | | attgtttcttaggctatttttgtacttgttactttggcctcttttgtttactcaaccgctactttagactgactcttggtgtttatgattacttagttt |
| | | ctacacaggagtttagatatatgaattcacagggactactcccacccaagaatagcatagatgccttcaaactcaacattaaattgttgggtgttggtg |
| | | gcaaaccttgtatcaaagtagccactgtacagtctaaaatgtcagatgtaaagtgcacatcagtagtcttactctcagttttgcaacaactcagagtag |
| | | aatcatcatctaaattgtgggctcaatgtgtccagttacacaatgacattctcttagctaaagatactactgaagcctttgaaaaaatggtttcactac |
| | | tttctgttttgattccatgcagggtgctgtagacataaacaagctttgtgaagaaatgctggacaacagggcaaccttacaagctatagcctcagagtt |
| | | tagttcccttccatcatatgcagcttttgctactgctcaagaagcttatgagcaggctgttgctaatggtgattctgaagttgttcttaaaaagttgaa |
| | | gaagtctttgaatgtggctaaatctgaatttgaccgtgatgcagccatgcaacgtaagttggaaaagatggctgatcaagctatgacccaaatgtataa |
| | | acaggctagatctgaggacaagagggcaaaagttactagtgctatgcagacaatgatttcactatgcttagaaagttggataatgatgcactcaacaac |
| | | attatcaacaatgcaagagatggttgtgttcccttgaacataatacctcttacaacagcagccaaactaatggttgtcataccagactataacacatat |
| | | aaaaatacgtgtgatggtacaacatttacttatgcatcagcattgtgggaaatccaacaggttgtagatgcagatagtaaaattgttcaacttagtgaa |
| | | attagtatggacaattcacctaatttagcatggcctcttattgtaacagctttaagggccaattctgctgtcaaattacagaataatgagcttagtcct |
| | | gttgcactacgacagatgtcttgtgctgccggtactacacaaactgcttgcactgatgacaatgcgttagcttactacaacacaacaaagggaggtagg |
| | | tttgtacttgcactgttatccgatttacaggatttgaaatgggctagattccctaagagtgatggaactggtactatctatacagaactggaaccacct |
| | | tgtaggtttgttacagacacacctaaaggtcctaaagtgaagtatttatactttattaaaggattaaacaacctaaatagaggtatggtacttggtagt |
| | | ttagctgccacagtacgtctacaagctggtaatgcaacagaagtgcctgccaattcaactgtattatattctgtgatttgctgtagatgctgctaaagc |
| | | ttacaaagattatctagctagtgggggacaaccaatcactaattgtgttaagatgttgtgtacacacactggtactggtcaggcaataacagttacacc |
| | | ggaagccaatatggatcaagaatcctttggtggtgcatcgtgttgtctgtactgccgttgccacatagatcatccaaatcctaaaggattttgtgactt |
| | | aaaaggtaagtatgtacaaatacctacaacttgtgctaatgaccagtgggttttacacttaaaaacacagtagtaccgtctgcggtatgtggaaaggtt |
| | | atggctgtagttgtgatcaactccgcgaacccatgcttcagtcagctgatgcacaatcgtttttaaacgggtttgcggtgtaagtgcagcccgtcttac |
| | | accgtgcggcacaggcactagtactgatgtcgtatacagggcttttgacatctacaatgataaagtagaggttttgctaaattcctaaaaactaattgt |
| | | tgtcgcttccaagaaaaggacgaagatgacaatttaattgattcttactttgtagttaagagacacactttctctaactaccaacatgaagaaacaatt |
| | | tataatttacttaaggattgtccagctgttgctaaacatgacttctttaagtttagaatagacggtgacatggtaccacatatatcacgtcaacgtctt |
| | | actaaatacacaatggcagacctcgtctatgctttaaggcattttgatgaaggtaattgtgacacattaaaagaaatacttgtcacatacaattgttgt |
| | | gatgatgattatttcaataaaaaggactggtatgattttgtagaaaacccagatatattacgcgtatacgccaacttaggtgaacgtgtacgccaagat |
| | | tgttaaaaacagtacaattctgtgatgccatgcgaaatgctggtattgttggtgtactgacattagataatcaagatctcaatggtaactggtatgatt |
| | | tcggtgatttcatacaaaccacgccaggtagtggagttcctgttgtagattcttattattcattgttaatgcctatattaaccttgaccagggctttaa |
| | | ctgcagagtcacatgttgacactgacttaacaaagccttacattaagtgggatttgttaaaatatgacttcacggaagagaggttaaaactattgaccg |
| | | ttattttaaatattgggatcagacataccacccaaattgtgttaactgtttggatgacagatgcattctgcattgtgcaaactttaatgttttattact |
| | | acagtgttcccacctacaagttttggaccactagtgagaaaaatatttgttgatggtgttccatttgtagtttcaactggataccacttcagagagcta |
| | | ggtgttgtacataatcaggatgtaaacttacatagactagacttagttttaaggaattacttgtgtatgctgctgaccctgctatgcacgctgatctgg |
| | | taatctattactagataaacgcactacgtgcttttcagtagctgcacttactaacaatgttgatttcaaactgtcaaacccggtaattttaacaaagac |
| | | ttctatgactttgctgtgtctaagggtttattaaggaaggaagttctgttgaattaaaacacttcttattgctcaggatggtaatgctgctatcagcga |
| | | ttatgactactatcgttataatctaccaacaatgtgtgatatcagacaactactatttgtagttgaagttgttgataagtactttgattgttacgatgg |
| | | tggctgtattaatgctaaccaagtcatcgtcaacaacctagacaaatcagaggttttccatttaataaatggggtaaggctagactttattatgattca |
| | | atgagttatgaggatcaagatgcacttttcgcatatacaaaacgtaatgtcatccctactataactcaaatgaatcttaagtatgccattagtgcaaag |
| | | aatagagctcgcaccgtagctggtgtctctatctgtagtactatgaccaatagacagtttcatcaaaaattattgaaatcaatagccgccactagagga |
| | | gctactgtagtaattggaacaagcaaattctatggtggttggcacaacatgttaaaaactgtttatagtgatgtagaaaaccdcaccttatgggttggg |
| | | attatcctaaatgtgatagagccatgcctaacatgcttagaattatggcctcacttgttcttgctcgcaaacatacaacgtgttgtagcttgtcacacc |
| | | gtttctatagattagctaatgagtgtgctcaagtattgagtgaaatggtcatgtgtggcggttcactatatgttaaaccaggtggaacctcatcaggag |
| | | atgccacaactgcttatgctaatagtgtttttaacatttgtcaagctgtcacggccaatgttaatgcacttttatctactgatggtaacaaaattgccg |
| | | ataagtatgtccgcaatttacaacacagactttatgagtgtctctatagaaatagagatgttgacacagactttgtgaatgagttttacgcatatttgc |
| | | gtaaacatttctcaatgatgatactctctgacgatgctgttgtgtgtttcaatagcacttatgcatctcaaggtctagtggctagcataaagaacttta |
| | | agtcagttattattatcaaaacaatgtttttatgtctgaagcaaaatgttggactgagactgaccttactaaaggacctcatgaattttgactcaacat |
| | | acaatgctagttaaacagggtgatgattatgtgtaccttccttacccagatccatcaagaatcctaggggccggctgttttgtagatgatatcgtaaaa |
| | | acagatggtacacttatgattgaacggttcgtgtctttagctatagatgcttacccacttactaaacatcctaatcaggagtatgctgatgtattcatt |
| | | tgtacttacaatacataagaaagctacatgatgagttaacaggacacatgttagacatgtattctgttatgcttactaatgataacacttcaaggtatt |
| | | gggaacctgagttttatgaggctatgtacacaccgcatacagtcttacaggctgttggggcttgtgttattgcaattcacagacttcattaagatgtgg |
| | | tgcttgcatacgtagaccattcttatgttgtaaatgctgttacgaccatgtcatatcaacatcacataaattagtcttgtagttaatccgtatgtttgc |
| | | aatgctccaggttgtgatgtcacagatgtgactcaactttacttaggaggtatgagctattattgtaaatcacataaaccacccattagttttccattg |
| | | tgtgctaatggacaagtttttggtttatataaaaatacatgtgttggtagcgataatgttactgactttaatgcaattgcaacatgtgactggacaaat |
| | | gctggtgattacattttagctaacacctgtactgaaagactcaagattttgcagcagaaacgctcaaagctactgaggagacatttaaactgtcttatg |
| | | gtattgctactgtacgtgaagtgctgtctgacagagaattacatctttcatgggaagttggtaaacctagaccaccacttaaccgaaattatgtattac |
| | | tggttatcgtgtaactaaaaacagtaaagtacaaataggagagtacacctttgaaaaaggtgactatggtgatgctgttgtttaccgaggtacaacaac |
| | | ttacaaattaaatgttggtgattattttgtgctgacatcacatacagtaatgccattaagtgcacctacactagtgccacaagagcactatgttagaat |
| | | tactggcttatacccaacactcaatatctcagatgagttttctagcaatgttgcaaattatcaaaaggttggtatgcaaaagtattctacactccaggg |
| | | accacctggtactggtaagagtcattttgctattggcctagctctctactacccttctgctcgcatagtgtatacagcttgactcatgccgctgttgat |
| | | gcactatgtgagaaggcattaaaatatttgcctatagataaatgtagtagaattatacctgcacgtgctcgtgtagagtgttttgataaattcaaagtg |
| | | aattcaacattagaacagtatgtatttgtactgtaaatgcattgcctgagacgacagcagatatagttgtattgatgaaatttcaatggccacaaatta |
| | | tgatttgagtgttgtcaatgccagattacgtgctaagcactatgtgtacattggcgaccctgctcaattacctgcaccacgcacattgctaactaaggg |
| | | cacactagaaccagaatatttcaattcagtgtgtagacttatgaaaactataggtccagacatgttcctcggaacttgtcggcgttgtcctgctgaaat |
| | | tgttgacactgtgagtgctttggtttatgataataagcttaaagcacataaagacaaatcagctcaatgattaaaatgttttataagggtgttatcacg |
| | | catgatgtttcatctgcaattaacaggccacaaataggcgtggtaagagaattccttacacgtaaccctgcttggagaaaagctgtctttatttcacct |
| | | tataattcacagaatgctgtagcctcaaagattttgggactaccaactcaaactgttgattcatcacagggctcagaatatgactatgtcatattcact |
| | | caaaccactgaaacagctcactcttgtaatgtaaacagatttaatgttgctattaccagagcaaaagtaggcatactttgcataatgtctgatagagac |
| | | ctttatgacaagttgcaatttacaagtcttgaaattccacgtaggaatgtggcaactttacaagctgaaaatgtaacaggactctttaaagattgtagt |
| | | aaggtaatcactgggttacatcctacacaggcacctacacacctcagtgttgacactaaattcaaaactgaaggtttatgtgttgacatacctggcata |
| | | cctaaggacatgacctatagaagactcatctctatgatgggttttaaaatgaattatcaagttaatggttaccctaacatgtttatcacccgcgaagaa |
| | | gctataagacatgtacgtgcatggattggcttcgatgtcgaggggtgtcatgctactagagaagctgttggtaccaatttacctttacagctaggtttt |
| | | tctacaggtgttaacctagttgctgtacctacaggttatgttgatacacctaataatacagatttttccagagttagtgctaaaccaccgcctggagat |
| | | caatttaaacacctcataccacttatgtacaaaggacttccttggaatgtagtgcgtataaagattgtacaaatgttaagtgacacacttaaaaatctc |
| | | tctgacagagtcgtatttgtcttatgggcacatggctttgagttgacatctatgaagtattttgtgaaaataggacctgagcgcacctgttgtctatgt |
| | | gatagacgtgccacatgatttccactgcttcagacacttatgcctgttggcatcattctattggatttgattacgtctataatccgtttatgattgatg |
| | | ttcaacaatggggttttacaggtaacctacaaagcaaccatgatctgtattgtcaagtccatggtaatgcacatgtagctagttgtgatgcaatcatga |
| | | ctaggtgtctagagtccacgagtgctttgttaagcgtgttgactggactattgaatatcctataattggtgatgaactgaagattaatgcggcttgtag |
| | | aaaggttcaacacatggttgttaaagctgcattattagcagacaaattcccagttcttcacgacattggtaaccctaaagctattaagtgtgtacctca |
| | | agctgatgtagaatggaagttctatgatgcacagccttgtagtgacaaagcttataaaatagaagaattattctattcttatgccacacattctgacaa |
| | | attcacagatggtgtatgcctattttggaattgcaatgtcgatagatatcctgctaattccattgtttgtagatttgacactagagtgctatctaacct |
| | | taacttgcctggttgtgatggtggcagtttgtatgtaaataaacatgcattccacacaccagcttttgataaaagtgatttgttaatttaaaacaatta |
| | | ccatttttctattactctgacagtccatgtgagtctcatggaaaacaagtagtgtcagatatagattatgtaccactaaagtctgctacgtgtataaca |
| | | cgttgcaatttaggtggtgctgtctgtagacatcatgctaatgagtacagattgtatctcgatgcttataacatgatgatctcagctggctttagcttg |
| | | tgggtttacaaacaatttgatacttataacctctggaacacttttacaagacttcagagtttagaaaatgtggcttttaatgttgtaaataagggacac |
| | | tttgatggacaacagggtgaagtaccagtttctatcattaataacactgtttacacaaaagttgatggtgttgatgtagaattgtttgaaaataaaaca |
| | | acattacctgttaatgtagcatttgagctttgggctaagcgcaacattaaaccagtaccagaggtgaaaatactcaataatttgggtgtggacattgct |
| | | gctaatactgtgatctgggactacaaaagagatgaccagcacatatatctactattggtgtttgttctatgactgacatagccaagaaaccaactgaaa |
| | | cgatttgtgcaccactcactgtcttttttgatggtagagttgatggtcaagtagacttatttagaaatgcccgtaatggtgttcttattacagaaggta |
| | | gtgttaaaggtttacaaccatctgtaggtcccaaacaagctagtcttaatggagtcacattaattggagaagccgtaaaaacacagttcaattattata |
| | | agaaagttgatggtgttgtccaacaattacctgaaacttactttactcagagtagaaatttacaagaatttaaacccaggagtcaaatggaaattgatt |
| | | tcttagaattagctatggatgaattcattgaacggtataaattagaaggctatgccttcgaacatatcgtttatggagattttagtcatagtcagttag |
| | | gtggtttacatctactgattggactagctaaacgttttaaggaatcaccttttgaattagaagattttattcctatggacagtacagttaaaaactatt |
| | | tcataacagatgcgcaaacaggttcatctaagtgtgtgtgttctgttattgatttattacttgatgattttgttgaaataataaaatcccaagatttat |
| | | ctgtagtttctaaggttgtcaaagtgactattgactatacagaaatttcatttatgattggtgtaaagatggccatgtagaaacatt-ttacccaaaat |
| | | tacaatctagtcaagcgtggcaaccgggtgttgctatgcctaatattacaaaatgcaaagaatgctattagaaaagtgtgaccttcaaaattatggtga |
| | | tagtgcaacattacctaaaggcataatgatgaatgtcgcaaaatatactcaactgtgtcaatatttaaacacattaacattagctgtaccctataatat |
| | | gagagttatacattttggtgctggttctgataaaggagttgcaccaggtacagctgttttaagacagtggttgcctacgggtacgctgcttgtcgattc |
| | | agatcttaatgactttgtctctgatgcagattcaactttgattggtgattgtgcaactgtacatacagctaataaatgggatctcattattagtgatat |
| | | gtacgaccctaagactaaaaatgttacaaaagaaaatgactctaaagagggttttttcacttacatttgtgggtttatacaacaaaagctagctcttgg |
| | | aggttccgtggctataaagataacagaacattcttggaatgctgatctttataagctcatgggacacttcgcatggtggacagcctttgttactaatgt |
| | | gaatgcgtcatcatctgaagcatttttaattggatgtaattatcttggcaaaccacgcgaacaaatagatggttatgtcatgcatgcaaattacatatt |
| | | ttggaggaatacaaatccaattcagttgtcttcctattctttatttgacatgagtaaatttccccttaaattaaggggtactgctgttatgtattaaaa |
| | | gaaggtcaaatcaatgatatgattttatctcttcttagtaaaggtagacttataattagagaaaacaacagagttgttatttctagtgatgttcttgtt |
| | | aacaactaaacgaacaatgtttgtttttcttgttttattgccactagtctctagtcagtgtgttaatcttacaaccagaactcaattaccccctgcata |
| | | cactaattattcacacgtggtgtttattaccctgacaaagttttcagatcctcagttttacattcaactcaggacttgttcttacctttcttttccaat |
| | | gttacttggttccatgctatacatgtctctgggaccaatggtactaagaggtttgataaccagtcctaccatttaatgatggtgtttattttgcttcca |
| | | ctgagaagtctaacataataagaggctggatttttggtactactttagattcgaagacccagtccctacttattgttaataacgctactaatgttgtta |
| | | ttaaagtagtgaatttcaattttgtaatgatccatttttgggtgtttattaccacaaaaacaacaaaagttggatggaaagtgagttcagagtttattc |
| | | tagtgcgaataattgcacttttgaatatgtctctcagccttttcttatggaccttgaaggaaaacagggtaatttcaaaaatcttagggaatttgtgtt |
| | | taagaatattgatggttattttaaaatatattctaagcacacgcctattaatttagtgcgtgatctccctcagggtttttcggctttagaaccattggt |
| | | agatttgccaataggtattaacatcactaggtttcaaactttacttgctttacatagaagttatttgactcctggtgattcttcttcaggttggacaga |
| | | ggtgctgcagcttattatgtgggttatcttcaacctaggacttttctattaaaatataatgaaaatggaaccattacagatgctgtagactgtgcactt |
| | | gaccctctctcagaaacaaagtgtacgttgaaatccttcactgtagaaaaaggaatctatcaaacttctaactttagagtccaaccaacagaatctatt |
| | | gttagatttcctaatattacaaacttgtgccatttggtgaagtttttaacgccaccagatttgcatctgtttatgcttggaacaggaagagaatcagca |
| | | actgtgttgctgattattctgtcctatataattccgcatcattttccacttttaagtgttatggagtgtctcctactaaattaaatgatctctgattac |
| | | taatgtctatgcagattcatttgtaattagaggtgatgaagtcagacaaatcgctccagggcaaactggaaagattgctgattataattataaattacc |
| | | agatgattttacaggctgcgttatagcttggaattctaacaatcttgattctaaggttggtggtaattataattacctgtatagattgtttaggaagtc |
| | | taatctcaaaccttttgagagagatatttcaactgaaatctatcaggccggtagcacaccttgtaatggtgttgaaggttttaattgttactttcatta |
| | | caatcatatggtttccaacccactaatggtgttggttaccaaccatacagagtagtagtactttatttgaacttctacatgcaccagcaactgtttgtg |
| | | gacctaaaaagtctactaatttggttaaaaacaaatgtgtcaatttcaacttcaatggtttaacaggcacaggtgttcttactgagtctaacaaaaagt |
| | | ttctgcctttccaacaatttggcagagacattgctgacactactgatgctgtccgtgatccacagacacttgagattcttgacattacaccatgttatt |
| | | tggtggtgtcagtgttataacaccaggaacaaatacttctaaccaggttgctgttctttatcaggatgttaactgcacagaagtccctgttgctattca |
| | | tgcagatcaacttactcctacttggcgtgtttattctacaggttctaatgtttttcaaacacgtgcaggctgtttaataggggctgaacatgtcaacaa |
| | | ctcatatgagtgtgacatacccattggtgcaggtatatgcgctagttatcagactcagactaattctcctcggcgggcacgtagtgtagctagtcaatc |
| | | catcattgcctacactatgtcacttggtgcagaaaattcagttgcttactctaataactctattgccatacccacaaattttactattagtgttaccac |
| | | agaaattctaccagtgtctatgaccaagacatcagtagattgtacaatgtacatttgtggtgattcaactgaatgcagcaatatttgttgcaatatggc |
| | | agtttttgtacacaattaaaccgtgattaactggaatagagttgaacaagacaaaaacacccaagaagtttttgcacaagtcaaacaaatttacaaaac |
| | | accaccaattaaagattttggtggttttaatttttcacaaatattaccagatccatcaaaaccaagcaagaggtcatttattgaagatctacttttcaa |
| | | caaagtgacacttgcagatgctggcttcatcaaacaatatggtgattgccttggtgatattgctgctagagacctcatttgtgcacaaaagtttaacgg |
| | | ccttactgttttgccacctttgctcacagatgaaatgattgctcaatacacttctgcactgttagcgggtacaatcacttctggttggacctttggtgc |
| | | aggtgctgcattacaaataccatttgctatgcaaatggcttataggtttaatggtattggagttacacagaatgttactatgagaaccaaaaattgatt |
| | | gccaaccaatttaatagtgctattggcaaaattcaagactcactttcttccacagcaagtgcacttggaaaacttcaagatgtggtcaaccaaaatgca |
| | | caagctttaaacacgcttgttaaacaacttagctccaattttggtgcaatttcaagtgttttaaatgatatcctttcacgtcttgacaaagttgaggct |
| | | gaagtgcaaattgataggttgatcacaggcagacttcaaagtttgcagacatatgtgactcaacaattaattagagctgcagaaatcagagcttctgct |
| | | aatcttgctgctactaaaatgtcagagtgtgtacttggacaatcaaaaagagttgatttttgtggaaagggctatcatcttatgtccttccctcagtca |
| | | gcacctcatggtgtagtcttcttgcatgtgacttatgtccctgcacaagaaaagaacttcacaactgctcctgccatttgtcatgatggaaaagcacac |
| | | tttcctcgtgaaggtgtctttgtttcaaatggcacacactggtttgtaacacaaaggaatttttatgaaccacaaatcattactacagacaacacattt |
| | | gtgtaggtaactgtgatgttgtaataggaattgtcaacaacacagtttatgatcattgcaacctgaattagactcattcaaggaggagttagataaata |
| | | ttttaagaatcatacatcaccagatgttgatttaggtgacatctctggcattaatgcttcagttgtaaacattcaaaaagaaattgaccgcctcaatga |
| | | ggttgccaagaatttaaatgaatctctcatcgatctccaagaacttggaaagtatgagcagtatataaaatggccatggtacatttggctaggttttat |
| | | agaggcttgattgccatagtaatggtgacaattatgattgctgtatgaccagttgctgtagttgtctcaagggctgttgttcttgtggatcctgctgca |
| | | aatttgatgaagacgactctgagccagtgctcaaaggagtcaaattacattacacataaacgaacttatggatttgtttatgagaatcttcacaattgg |
| | | aactgtaactttgaagcaaggtgaaatcaaggatgctactccttcagattttgttcgcgctactgcaacgataccgatacaagcctcactccctttcgg |
| | | atggcttattgttggcgttgcacttcttgctgtttttcagagcgcttccaaaatcataaccctcaaaaagagatggcaactagcactctccaagggtgt |
| | | tcactttgtttgcaacttgctgttgttgtttgtaacagtttactcacaccttttgctcgttgctgctggccttgaagccccttttctctatctttatga |
| | | ttagtctacttatgcagagtataaactttgtaagaataataatgaggctttggctttgctggaaatgccgttccaaaaacccattactttatgatgcca |
| | | actattttctttgctggcatactaattgttacgactattgtataccttacaatagtgtaacttcttcaattgtcattacttcaggtgatggcacaacaa |
| | | gtcctatttctgaacatgactaccagattggtggttatactgaaaaatgggaatctggagtaaaagactgtgttgtattacacagttacttcacttcag |
| | | actattaccagctgtactcaactcaattgagtacagacactggtgttgaacatgttaccttcttcatctacaataaaattgttgatgagcctgaagaac |
| | | atgtccaaattcacacaatcgacggttcatccggagttgttaatccagtaatggaaccaatttatgatgaaccgacgacgactactagcgtgcctttgt |
| | | aagcacaagctgatgagtacgaacttatgtactcattcgtttcggaagagacaggtacgttaatagttaatagcgtacttctttttcttgattcgtggt |
| | | attcttgctagttacactagccatccttactgcgcttcgattgtgtgcgtactgctgcaatattgttaacgtgagtcttgtaaaaccttctttttacgt |
| | | ttactctcgtgttaaaaatctgaattcttctagagttcctgatcttctggtctaaacgaactaaatattatattagtttttctgtttggaactttaatt |
| | | ttagccatggcagattccaacggtactattaccgttgaagagcttaaaaagctccttgaacaatggaacctagtaataggtttcctattccttacatgg |
| | | atttgtcttctacaatttgcctatgccaacaggaataggtttttgtatataattaagttaattttcctaggctgttatggccagtaactttagcttgtt |
| | | ttgtgcttgctgctgtttacagaataaattggatcaccggtggaattgctatcgcaatggcttgtcttgtaggcttgatgtggctcagctacttcattg |
| | | cttctttcagactgtttgcgcgtacgcgttccatgtggtcattcaatccagaaactaacattcttctcaacgtgccactccatggcactattctgacca |
| | | gaccgcttctagaaagtgaactcgtaatcggagctgtgatccttcgtggacatcttcgtattgctggacaccatctaggacgctgtgacatcaaggacc |
| | | tgcctaaagaaatcactgttgctacatcacgaacgctttcttattacaaattgggagcttcgcagcgtgtagcaggtgactcaggttttgctgcataca |
| | | gtcgctacaggattggcaactataaattaaacacagaccattccagtagcagtgacaatattgattgcttgtacagtaagtgacaacagatgtttcatc |
| | | tcgttgactttcaggttactatagcagagatattactaattattatgaggacttttaaagtttccatttggaatcttgattacatcataaacctcataa |
| | | ttaaaaatttatctaagtcactaactgagaataaatattctcaattagatgaagagcaaccaatggagattgattaaacgaacatgaaaattattattt |
| | | cttggcactgataacactcgctacttgtgagattatcactaccaagagtgtgttagaggtacaacagtacttttaaaagaaccttgctcttctggaaca |
| | | tacgagggcaattcaccatttcatcctctagctgataacaaatttgcactgacttgctttagcactcaatttgcttttgcttgtcctgacggcgtaaaa |
| | | cacgtctatcagttacgtgccagatcagtttcacctaaactgttcatcagacaagaggaagttcaagaactttactctccaatttttcttattgttgcg |
| | | gcaatagtgtttataacactttgcttcacactcaaaagaaagacagaatgattgaactttcattaattgacttctatttgtgctttttagcctttctgc |
| | | tattccttgttttaattatgcttattatcttttggttctcacttgaactgcaagatcataatgaaacttgtcacgcctaaacgaacatgaaatttcttg |
| | | ttttcttaggaatcatcacaactgtagctgcatttcaccaagaatgtagtttacagtcatgtactcaacatcaaccatatgtagttgatgacccgtgtc |
| | | ctattcacttctattctaaatggtatattagagtaggagctagaaaatcagcacctttaattgaattgtgcgtggatgaggctggttctaaatcaccca |
| | | ttcagtacatcgatatcggtaattatacagtttcctgtttaccttttacaattaattgccaggaacctaaattgggtagtcttgtagtgcgttgttcgt |
| | | tctatgaagactttttagagtatcatgacgttcgtgttgttttagatttcatctaaacgaacaaactaaaatgtctgataatggaccccaaaatcagcg |
| | | aaatgcaccccgcattacgtttggtggaccctcagattcaactggcagtaaccagaatggagaacgcagtggggcgcgatcaaaacaacgtcggcccca |
| | | aggtttacccaataatactgcgtatggttcaccgctctcactcaacatggcaaggaagaccttaaattccctcgaggacaaggcgttccaattaacacc |
| | | aatagcagtccagatgaccaaattggctactaccgaagagctaccagacgaattcgtggtggtgacggtaaaatgaaagatctcagtccaagatggtat |
| | | ttctactacctaggaactgggccagaagctggacttccctatggtgctaacaaagacggcatcatatgggttgcaactgagggagccttgaatacacca |
| | | aaagatcacattggcacccgcaatcctgctaacaatgctgcaatcgtgctacaacttcctcaaggaacaacattgccaaaaggcttctacgcagaaggg |
| | | agcagaggcggcagtcaagcctcttctcgttcctcatcacgtagtcgcaacagttcaagaaattcaactccaggcagcagtaggggaacttctcctgct |
| | | agaatggctggcaatggcggtgatgctgctcttgctttgctgctgcttgacagattgaaccagcttgagagcaaaatgtctggtaaaggccaacaacaa |
| | | caaggccaaactgtcactaagaaatctgctgctgaggcttctaagaagcctcggcaaaaacgtactgccactaaagcatacaatgtaacacaagctttc |
| | | ggcagacgtggtccagaacaaacccaaggaaattttggggaccaggaactaatcagacaaggaactgattacaaacattggccgcaaattgcacaattt |
| | | gcccccagcgcttcagcgttcttcggaatgtcgcgcattggcatggaagtcacaccttcgggaacgtggttgacctacacaggtgccatcaaattggat |
| | | gacaaagatccaaatttcaaagatcaagtcattttgctgaataagcatattgacgcatacaaaacattcccaccaacagagcctaaaaaggacaaaaag |
| | | aagaaggctgatgaaactcaagccttaccgcagagacagaagaaacagcaaactgtgactatatcctgctgcagatttggatgatttctccaaacaatt |
| | | gcaacaatccatgagcagtgctgactcaactcaggcctaaactcatgcagaccacacaaggcagatgggctatataaacgttttcgcttttccgtttac |
| | | gatatatagtctactcttgtgcagaatgaattctcgtaactacatagcacaagtagatgtagttaactttaatctcacatagcaatctttaatcagtgt |
| | | gtaacattagggaggacttgaaagagccaccacattttcaccgaggccacgcggagtacgatcgagtgtacagtgaacaatgctagggagagctgccta |
| | | tatggaagagccctaatgtgtaaaattaattttagtagtgctatccccatgtgattttaatagatataggagaatgacaaaaaaaaaaaaaaaaaaaaa |
| | | aaaaaaaaaaaa |
| 5536 | SARS-CoV-1 genome | atattaggtttttacctacccaggaaaagccaaccaacctcgatctcttgtagatctgttctctaaacgaactttaaaatctgtgtagctgtcgctcgg |
| | Genbank Accession No. NC_004718.3 | ctgcatgcctagtgcacctacgcagtataaacaataataaattttactgtcgttgacaagaaacgagtaactcgtccctcttctgcagactgcttacgg |
| | | tttcgtccgtgttgcagtcgatcatcagcatacctaggtttcgtccgggtgtgaccgaaaggtaagatggagagccttgttcttggtgtcaacgagaaa |
| | | acacacgtccaactcagtttgcctgtccttcaggttagagacgtgctagtgcgtggcttcggggactctgtggaagaggccctatcggaggcacgtgaa |
| | | cacctcaaaaatggcacttgtggtctagtagagctggaaaaaggcgtactgccccagcttgaacagccctatgtgttcattaaacgttctgatgcctta |
| | | agcaccaatcacggccacaaggtcgttgagctggttgcagaaatggacggcattcagtacggtcgtagcggtataacactgggagtactcgtgccacat |
| | | gtgggcgaaaccccaattgcataccgcaatgttcttcttcgtaagaacggtaataagggagccggtggtcatagctatggcatcgatctaaagtcttat |
| | | gacttaggtgacgagcttggcactgatcccattgaagattatgaacaaaactggaacactaagcatggcagtggtgcactccgtgaactcactcgtgag |
| | | ctcaatggaggtgcagtcactcgctatgtcgacaacaatttctgtggcccagatgggtaccctcttgattgcatcaaagattttctcgcacgcgcgggc |
| | | aagtcaatgtgcactattccgaacaacttgattacatcgagtcgaagagaggtgtctactgctgccgtgaccatgagcatgaaattgcctggttcactg |
| | | agcgctctgataagagctacgagcaccagacacccttcgaaattaagagtgccaagaaatttgacactttcaaaggggaatgcccaaagtttgtgtttc |
| | | ctcttaactcaaaagtcaaagtcattcaaccacgtgttgaaaagaaaaagactgagggtttcatggggcgtatacgctctgtgtaccctgttgcatctc |
| | | cacaggagtgtaacaatatgcacttgtctaccttgatgaaatgtaatcattgcgatgaagtttcatggcagacgtgcgactttctgaaagccacttgtg |
| | | aacattgtggcactgaaaatttagttattgaaggacctactacatgtgggtacctacctactaatgctgtagtgaaaatgccatgtcctgcctgtcaag |
| | | acccagagattggacctgagcatagtgttgcagattatcacaaccactcaaacattgaaactcgactccgcaagggaggtaggactagatgttttggag |
| | | gctgtgtgtttgcctatgttggctgctataataagcgtgcctactgggttcctcgtgctagtgctgatattggctcaggccatactggcattactggtg |
| | | acaatgtggagaccttgaatgaggatctccttgagatactgagtcgtgaacgtgttaacattaacattgttggcgattttcatttgaatgaagaggttg |
| | | ccatcattttggcatctttctctgatctacaagtgcctttattgacactataaagagtcttgattacaagtattcaaaaccattgttgagtcctgcggt |
| | | aactataaagttaccaagggaaagcccgtaaaaggtgcttggaacattggacaacagagatcagttttaacaccactgtgtggttttccctcacaggct |
| | | gctggtgttatcagatcaatttttgcgcgcacacttgatgcagcaaaccactcaattcctgatttgcaaagagcagctgtcaccatacttgatggtatt |
| | | tctgaacagtcattacgtcttgtcgacgccatggtttatacttcagacctgctcaccaacagtgtcattattatggcatatgtaactggtggtcttgta |
| | | caacagacttctcagtggttgtctaatcttttgggcactactgttgaaaaactcaggcctatctttgaatggattgaggcgaaacttagtgcaggagtt |
| | | gaatttctcaaggatgcttgggagattctcaaatttctcattacaggtgtttttgacatcgtcaagggtcaaatacaggttgcttcagataacatcaag |
| | | gattgtgtaaaatgcttcattgatgttgttaacaaggcactcgaaatgtgcattgatcaagtcactatcgctggcgcaaagttgcgatcactcaactta |
| | | ggtgaagtcttcatcgctcaaagcaagggactttaccgtcagtgtatacgtggcaaggagcagctgcaactactcatgcctcttaaggcaccaaaagaa |
| | | gtaacctttcttgaaggtgattcacatgacacagtacttacctctgaggaggttgttctcaagaacggtgaactcgaagcactcgagacgcccgttgat |
| | | agcttcacaaatggagctatcgttggcacaccagtctgtgtaaatggcctcatgctcttagagattaaggacaaagaacaatactgcgcattgtctcct |
| | | ggtttactggctacaaacaatgtctttcgcttaaaagggggtgcaccaattaaaggtgtaacctttggagaagatactgtttgggaagttcaaggttac |
| | | aagaatgtgagaatcacatttgagcttgatgaacgtgttgacaaagtgcttaatgaaaagtgctctgtctacactgttgaatccggtaccgaagttact |
| | | gagtttgcatgtgttgtagcagaggctgttgtgaagactttacaaccagtttctgatctccttaccaacatgggtattgatcttgatgagtggagtgta |
| | | gctacattctacttatttgatgatgctggtgaagaaaacttttcatcacgtatgtattgttcdtttaccctccagatgaggaagaagaggacgatgcag |
| | | agtgtgaggaagaagaaattgatgaaacctgtgaacatgagtacggtacagaggatgattatcaaggtaccactggaatttggtgcctcagctgaaaca |
| | | gttcgagttgaggaagaagaagaggaagactggctggatgatactactgagcaatcagagattgagccagaaccagaacctacacctgaagaaccagtt |
| | | aatcagtttactggttatttaaaacttactgacaatgttgccattaaatgtgttgacatcgttaaggaggcacaaagtgctaatcctatggtgattgta |
| | | aatgctgctaacatacacctgaaacatggtggtggtgtagcaggtgcactcaacaaggcaaccaatggtgccatgcaaaaggagagtgatgattacatt |
| | | aagctaaatggccacttacagtaggagggtcttgtttgattctggacataatcttgctaagaagtgtctgcatgttgttggacctaacctaaatgcagg |
| | | tgaggacatccagcttcttaaggcagcatatgaaaatttcaattcacaggacatcttacttgcaccattgttgtcagcaggcatatttggtgctaaacc |
| | | acttcagtattacaagtgtgcgtgcagacggttcgtacacaggtttatattgcagtcaatgacaaagctattatgagcaggttgtcatggattatcttg |
| | | ataacctgaagcctagagtggaagcacctaaacaagaggagccaccaaacacagaagattccaaaactgaggagaaatctgtcgtacagaagcctgtcg |
| | | atgtgaagccaaaaattaaggcctgcattgatgaggttaccacaacactggaagaaactaagtttcttaccaataagttactcttgtttgctgatatca |
| | | atggtaagattaccatgattctcagaacatgcttagaggtgaagatatgtattccttgagaaggatgcaccttacatggtaggtgatgttatcactagt |
| | | ggtgatatcacttgtgttgtaataccaccaaaaaggctggtggcactactgagatgctctcaagagctttgaagaaagtgccagttgatgagtatataa |
| | | ccacgtaccaggacaaggatgtgctggttatacacttgaggaagctaagactgctcttaagaaatgcaaatctgcattttatgtactaccttcagaagc |
| | | acctaatgctaaggaagagattctaggaactgtatcctggaatttgagagaaatgcttgctcatgctgaagagacaagaaaattaatgcctatatgcat |
| | | ggatgttagagccataatggcaaccatccaacgtaagtataaaggaattaaaattcaagagggcatcgttgactatggtgtccgattcttatttatact |
| | | agtaaagagcctgtagcttctattattacgaagctgaactctctaaatgagccgcttgtcacaatgccaattggttatgtgacacatggttttaatctt |
| | | gaagaggctgcgcgctgtatgcgttctcttaaagctcctgccgtagtgtcagtatcatcaccagatgctgttactacatataatggatacctcacttcg |
| | | tcatcaaagacatctgaggagcactttgtagaaacagtttctttggctggctcttacagagattggtcctattcaggacagcgtacagagttaggtgtt |
| | | gaatttcttaagcgtggtgacaaaattgtgtaccacactaggagagccccgtcgagtttcatcttgacggtgaggttattcacttgacaaactaaagag |
| | | tctcttatccctgcgggaggttaagactataaaagtgttcacaactgtggacaacactaatctccacacacagcttgtggatatgtctatgacatatgg |
| | | acagcagtttggtccaacatacttggatggtgctgatgttacaaaaattaaacctcatgtaaatcatgagggtaagactttattgtactacctagtgat |
| | | gacacactacgtagtgaagctttcgagtactaccatactcttgatgagagttttcttggtaggtacatgtctgattaaaccacacaaagaaatggaaat |
| | | ttcctcaagttggtggtttaacttcaattaaatgggctgataacaattgttatttgtctagtgttttattagcacttcaacagcttgaagtcaaattca |
| | | atgcaccagcacttcaagaggcttattatagagcccgtgctggtgatgctgctaacttttgtgcactcatactcgcttacagtaataaaactgttggcg |
| | | agcttggtgatgtcagagaaactatgacccatcttctacagcatgctaatttggaatctgcaaagcgagttcttaatgtggtgtgtaaacattgtggtc |
| | | agaaaactactaccttaacgggtgtagaagctgtgatgtatatgggtactctatcttatgataatcttaagacaggtgtttccattccatgtgtgtgtg |
| | | gtcgtgatgctacacaatatctagtacaacaagagtcttcttttgttatgatgtctgcaccacctgctgagtataaattacagcaaggtacattcttat |
| | | gtgcgaatgagtacactggtaactatcagtgtggtcattacactcatataactgctaaggagaccctctatcgtattgacggagctcaccttacaaaga |
| | | tgtcagagtacaaaggaccagtgactgatgttttctacaaggaaacatcttacactacaaccatcaagcctgtgtcgtataaactcgatggagttactt |
| | | acacagagattgaaccaaaattggatgggtattataaaaaggataatgcttactatacagagcagcctatagaccttgtaccaactcaaccattaccaa |
| | | atgcgagttttgataatttcaaactcacatgttctaacacaaaatttgctgatgatttaaatcaaatgacaggcttcacaaagccagcttcacgagagc |
| | | tatctgtcacattcttcccagacttgaatggcgatgtagtggctattgactatagacactattcagcgagtttcaagaaaggtgctaaattactgcata |
| | | agccaattgtttggcacattaaccaggctacaaccaagacaacgttcaaaccaaacacttggtgtttacgttgtctttggagtacaaagccagtagata |
| | | cttcaaattcatttgaagttctggcagtagaagacacacaaggaatggacaatcttgcttgtgaaagtcaacaacccacctctgaagaagtagtggaaa |
| | | atcctaccatacagaaggaagtcatagagtgtgacgtgaaaactaccgaagttgtaggcaatgtcatacttaaaccatcagatgaaggtgttaaagtaa |
| | | cacaagagttaggtcatgaggatcttatggctgcttatgtggaaaacacaagcattaccattaagaaacctaatgagctttcactagccttaggtttaa |
| | | aaacaattgccactcatggtattgctgcaattaatagtgttccttggagtaaaattttggcttatgtcaaaccattcttaggacaagcagcaattacaa |
| | | catcaaattgcgctaagagattagcacaacgtgtgtttaacaattatatgccttatgtgtttacattattgttccaattgtgtacttttactaaaagta |
| | | ccaattctagaattagagcttcactacctacaactattgctaaaaatagtgttaagagtgttgctaaattatgtttggatgccggcattaattatgtga |
| | | agtcacccaaattttctaaattgttcacaatcgctatgtggctattgttgttaagtatttgcttaggttactaatctgtgtaactgctgatttggtgta |
| | | ctcttatctaattttggtgctccttcttattgtaatggcgttagagaattgtatcttaattcgtctaacgttactactatggatttctgtgaaggttct |
| | | tttccttgcagcatttgtttaagtggattagactcccttgattcttatccagctcttgaaaccattcaggtgacgatttcatcgtacaagctagacttg |
| | | acaattttaggtaggccgctgagtgggttttggcatatatgttgttcacaaaattcttttatttattaggtctttcagctataatgcaggtgttctttg |
| | | gctattttgctagtcatttcatcagcaattcttggctcatgtggtttatcattagtattgtacaaatggcacccgtttctgcaatggttaggatgtaca |
| | | tcttctttgcttctttctactacatatggaagagctatgttcatatcatggatggttgcacctcttcgacttgcatgatgtgctataagcgcaatcgtg |
| | | ccacacgcgttgagtgtacaactattgttaatggcatgaagagatctttctatgtctatgcaaatggaggccgtggcttctgcaagactcacaattgga |
| | | attgtctcaattgtgacacattttgcactggtagtacattcattagtgatgaagttgctcgtgatttgtcactccagtttaaaagaccaatcaacccta |
| | | ctgaccagtcatcgtatattgttgatagtgttgctgtgaaaaatggcgcgcttcacctctactttgacaaggctggtcaaaagacctatgagagacatc |
| | | cgctctcccattttgtcaatttagacaatttgagagctaacaacactaaaggttcactgcctattaatgtcatagtttttgatggcaagtccaaatgcg |
| | | acgagtctgcttctaagtctgcttctgtgtactacagtcagctgatgtgccaacctattctgttgcttgaccaagctcttgtatcagacgttggagata |
| | | gtactgaagtttccgttaagatgtttgatgcttatgtcgacaccttttcagcaacttttagtgttcctatggaaaaacttaaggcacttgttgctacag |
| | | ctcacagcgagttagcaaagggtgtagattagatggtgtcctttctacattcgtgtcagctgcccgacaaggtgttgttgataccgatgttgacacaaa |
| | | ggatgttattgaatgtctcaaactttcacatcactctgacttagaagtgacaggtgacagttgtaacaatttcatgctcacctataataaggttgaaaa |
| | | catgacgcccagagatcttggcgcatgtattgactgtaatgcaaggcatatcaatgcccaagtagcaaaaagtcacaatgtttcactcatctggaatgt |
| | | aaaagactacatgtctttatctgaacagctgcgtaaacaaattcgtagtgctgccaagaagaacaacataccttttagactaacttgtgctacaactag |
| | | acaggttgtcaatgtcataactactaaaatctcactcaagggtggtaagattgttagtacttgttttaaacttatgcttaaggccacattattgtgcgt |
| | | tcttgctgcattggtttgttatatcgttatgccagtacatacattgtcaatccatgatggttacacaaatgaaatcattggttacaaagccattcagga |
| | | tggtgtcactcgtgacatcatttctactgatgattgttttgcaaataaacatgctggttttgacgcatggtttagccagcgtggtggttcatacaaaaa |
| | | tgacaaaagctgccctgtagtagctgctatcattacaagagagattggtttcatagtgcctggcttaccgggtactgtgctgagagcaatcaatggtga |
| | | cttcttgcattttctacctcgtgtttttagtgctgttggcaacatttgctacacaccttccaaactcattgagtatagtgattttgctacctctgcttg |
| | | cgttcttgctgctgagtgtacaatttttaaggatgctatgggcaaacctgtgccatattgttatgacactaatttgctagagggttctatttcttatag |
| | | tgagcttcgtccagacactcgttatgtgcttatggatggttccatcatacagtttcctaacacttacctggagggttctgttagagtagtaacaacttt |
| | | tgatgctgagtactgtagacatggtacatgcgaaaggtcagaagtaggtatttgcctatctaccagtggtagatgggttcttaataatgagcattacag |
| | | agctctatcaggagttttctgtggtgttgatgcgatgaatctcatagctaacatctttactcctcttgtgcaacctgtgggtgattagatgtgtctgct |
| | | tcagtagtggctggtggtattattgccatattggtgacttgtgctgcctactactttatgaaattcagacgtgtttttggtgagtacaaccatgttgtt |
| | | gctgctaatgcacttttgtttttgatgtctttcactatactctgtctggtaccagcttacagctttctgccgggagtctactcagtcttttacttgtac |
| | | ttgacattctatttcaccaatgatgtttcattcttggctcaccttcaatggtttgccatgttttctcctattgtgcctttttggataacagcaatctat |
| | | gtattctgtatttctctgaagcactgccattggttattaacaactatcttaggaaaagagtcatgtttaatggagttacatttagtaccttcgaggagg |
| | | ctgattgtgtacctttttgctcaacaaggaaatgtacctaaaattgcgtagcgagacactgttgccacttacacagtataacaggtatcttgctctata |
| | | taacaagtacaagtatttcagtggagccttagatactaccagctatcgtgaagcagcttgctgccacttagcaaaggctctaaatgactttagcaactc |
| | | aggtgctgatgttctctaccaaccaccacagacatcaatcacttctgctgttctgcagagtggttttaggaaaatggcattcccgtcaggcaaagttga |
| | | agggtgcatggtacaagtaacctgtggaactacaactcttaatggattgtggttggatgacacagtatactgtccaagacatgtcatttgcacagcaga |
| | | agacatgcttaatcctaactatgaagatctgctcattcgcaaatccaaccatagctttcttgttcaggctggcaatgttcaacttcgtgttattggcca |
| | | ttctatgcaaaattgtctgcttaggcttaaagttgatacttctaaccctaagacacccaagtataaatttgtccgtatccaacctggtcaaacattttc |
| | | agttctagcatgctacaatggttcaccatctggtgtttatcagtgtgccatgagacctaatcataccattaaaggttattccttaatggatcatgtggt |
| | | agtgttggttttaacattgattatgattgcgtgtattctgctatatgcatcatatggagcttccaacaggagtacacgctggtactgacttagaaggta |
| | | aattctatggtccatttgttgacagacaaactgcacaggctgcaggtacagacacaaccataacattaaatgttttggcatggctgtatgctgctgtta |
| | | tcaatggtgataggtggtttcttaatagattcaccactactttgaatgactttaaccttgtggcaatgaagtacaactatgaacctttgacacaagatc |
| | | atgttgacatattgggacctctttctgctcaaacaggaattgccgtcttagatatgtgtgctgctttgaaagagctgctgcagaatggtatgaatggtc |
| | | gtactatccttggtagcactattttagaagatgagtttacaccatttgatgttgttagacaatgctctggtgttaccttccaaggtaagttcaagaaaa |
| | | ttgttaagggcactcatcattggatgcttttaactttcttgacatcactattgattcttgttcaaagtacacagtggtcactgtttttctttgtttacg |
| | | agaatgctttcttgccatttactcttggtattatggcaattgctgcatgtgctatgctgcttgttaagcataagcacgcattcttgtgcttgtttctgt |
| | | taccttctcttgcaacagttgcttactttaatatggtctacatgcctgctagctgggtgatgcgtatcatgacatggcttgaattggctgacactagct |
| | | tgtaggttataggcttaaggattgtgttatgtatgcttcagctttagt-tttgcttattctcatgacagctcgcactgtttatgatgatgctgctagac |
| | | gtgtttggacactgatgaatgtcattacacttgtttacaaagtctactatggtaatgattagatcaagctatttccatgtgggccttagttatttctgt |
| | | aacctctaactattctggtgtcgttacgactatcatgtttttagctagagctatagtgtttgtgtgtgttgagtattacccattgttatttattactgg |
| | | caacaccttacagtgtatcatgcttgtttattgtttcttaggctattgttgctgctgctactttggccttttctgtttactcaaccgttacttcaggct |
| | | tactcttggtgtttatgactacttggtactacacaagaatttaggtatatgaactcccaggggcttttgcctcctaagagtagtattgatgattcaagc |
| | | ttaacattaagttgttgggtattggaggtaaaccatgtatcaaggttgctactgtacagtctaaaatgtctgacgtaaagtgcacatctgtggtactgc |
| | | tctcggttcttcaacaacttagagtagagtcatcttctaaattgtgggcacaatgtgtacaactccacaatgatattcttcttgcaaaagacacaactg |
| | | aagctttcgagaagatggtttctcttttgtctgttttgctatccatgcagggtgctgtagacattaataggttgtgcgaggaaatgctcgataaccgtg |
| | | ctactcttcaggctattgcttcagaatttagttattaccatcatatgccgcttatgccactgcccaggaggcctatgagcaggctgtagctaatggtga |
| | | ttctgaagtcgttctcaaaaagttaaagaaatctttgaatgtggctaaatctgagtttgaccgtgatgctgccatgcaacgcaagttggaaaagatggc |
| | | agatcaggctatgacccaaatgtacaaacaggcaagatctgaggacaagagggcaaaagtaactagtgctatgcaaacaatgctcttcactatgcttag |
| | | gaagcttgataatgatgcacttaacaacattatcaacaatgcgcgtgatggttgtgttccactcaacatcataccattgactacagcagccaaactcat |
| | | ggttgttgtccctgattatggtacctacaagaacacttgtgatggtaacacctttacatatgcatctgcactagggaaatccagcaagttgttgatgcg |
| | | gatagcaagattgttcaacttagtgaaattaacatggacaattcaccaaatttggcttggcctcttattgttacagctctaagagccaactcagctgtt |
| | | aaactacagaataatgaactgagtccagtagcactacgacagatgtcctgtgcggctggtaccacacaaacagcttgtactgatgacaatgcacttgcc |
| | | tactataacaattcgaagggaggtaggtttgtgctggcattactatcagaccaccaagatctcaaatgggctagattccctaagagtgatggtacaggt |
| | | acaatttacacagaactggaaccaccttgtaggtttgttacagacacaccaaaagggcctaaagtgaaatacttgtacttcatcaaaggcttaaacaac |
| | | ctaaatagaggtatggtgctgggcagtttagctgctacagtacgtcttcaggctggaaatgctacagaagtacctgccaattcaactgtgattccttct |
| | | gtgcttttgcagtagaccctgctaaagcatataaggattacctagcaagtggaggacaaccaatcaccaactgtgtgaagatgttgtgtacacacactg |
| | | gtacaggacaggcaattactgtaacaccagaagctaacatggaccaagagtcctttggtggtgcttcatgttgtagtattgtagatgccacattgacca |
| | | tccaaatcctaaaggattctgtgacttgaaaggtaagtacgtccaaatacctaccacttgtgctaatgacccagtgggttttacacttagaaacacagt |
| | | ctgtaccgtctgcggaatgtggaaaggttatggctgtagttgtgaccaactccgcgaacccttgatgcagtctgcggatgcatcaacgtttttaaacgg |
| | | gtttgcggtgtaagtgcagcccgtcttacaccgtgcggcacaggcactagtactgatgtcgtctacagggcttttgatatttacaacgaaaaagttgct |
| | | ggttttgcaaagttcctaaaaactaattgctgtcgcttccaggagaaggatgaggaaggcaatttattagactcttactttgtagttaagaggcatact |
| | | atgtctaactaccaacatgaagagactatttataacttggttaaagattgtccagcggttgctgtccatgactttttcaagtttagagtagatggtgac |
| | | atggtaccacatatatcacgtcagcgtctaactaaatacacaatggctgatttagtctatgactacgtcattttgatgagggtaattgtgatacattaa |
| | | aagaaatactcgtcacatacaattgctgtgatgatgattatttcaataagaaggattggtatgacttcgtagagaatcctgacatcttacgcgtatatg |
| | | ctaacttaggtgagcgtgtacgccaatcattattaaagactgtacaattctgcgatgctatgcgtgatgcaggcattgtaggcgtactgacattagata |
| | | atcaggatcttaatgggaactggtacgatttcggtgatttcgtacaagtagcaccaggctgcggagttcctattgtggattcatattactcattgctga |
| | | tgcccatcctcactttgactagggcattggctgctgagtcccatatggatgctgatctcgcaaaaccacttattaagtgggatttgctgaaatatgatt |
| | | ttacggaagagagactttgtctcttcgaccgttattttaaatattgggaccagacataccatcccaattgtattaactgtttggatgataggtgtatcc |
| | | ttcattgtgcaaactttaatgtgttattttctactgtgtttccacctacaagttttggaccactagtaagaaaaatatttgtagatggtgttccttttg |
| | | ttgtttcaactggataccattttcgtgagttaggagtcgtacataatcaggatgtaaacttacatagctcgcgtctcagtttcaaggaacttttagtgt |
| | | atgctgctgatccagctatgcatgcagcttctggcaatttattgctagataaacgcactacatgcttttcagtagctgcactaacaaacaatgttgatt |
| | | tcaaactgtcaaacccggtaattttaataaagacttttatgactttgctgtgtctaaaggtttctttaaggaaggaagttctgttgaactaaaacactt |
| | | cttctttgctcaggatggcaacgctgctatcagtgattatgactattatcgttataatctgccaacaatgtgtgatatcagacaactcctattcgtagt |
| | | tgaagttgttgataaatactttgattgttacgatggtggctgtattaatgccaaccaagtaatcgttaacaatctggataaatcagctggtttcccatt |
| | | taataaatggggtaaggctagactttattatgactcaatgagttatgaggatcaagatgcacttttcgcgtatactaagcgtaatgtcatccctactat |
| | | aactcaaatgaatcttaagtatgccattagtgcaaagaatagagctcgcaccgtagaggtgtactatctgtagtactatgacaaatagacagtttcatc |
| | | agaaattattgaagtcaatagccgccactagaggagctactgtggtaattggaacaagcaagttttacggtggctggcataatatgttaaaaactgttt |
| | | acagtgatgtagaaactccacaccttatgggttgggattatccaaaatgtgacagagccatgcctaacatgcttaggataatggcctctcttgttcttg |
| | | ctcgcaaacataacacttgctgtaacttatcacaccgtttctacaggttagctaacgagtgtgcgcaagtattaagtgagatggtcatgtgtggcggct |
| | | cactatatgttaaaccaggtggaacatcatccggtgatgctacaactgcttatgctaatagtgtctttaacatttgtcaagctgttacagccaatgtaa |
| | | atgcacttattcaactgatggtaataagatagctgacaagtatgtccgcaatctacaacacaggctctatgagtgtactatagaaatagggatgttgat |
| | | catgaattcgtggatgagttttacgcttacctgcgtaaacatttctccatgatgattctttctgatgatgccgttgtgtgctataacagtaactatgcg |
| | | gctcaaggtttagtagctagcattaagaactttaaggcagttattattatcaaaataatgtgttcatgtctgaggcaaaatgttggactgagactgacc |
| | | ttactaaaggacctcacgaattttgctcacagcatacaatgctagttaaacaaggagatgattacgtgtacctgccttacccagatccatcaagaatat |
| | | taggcgcaggctgttttgtcgatgatattgtcaaaacagatggtacacttatgattgaaaggttcgtgtcactggctattgatgcttacccacttacaa |
| | | aacatcctaatcaggagtatgctgatgtctttcacttgtatttacaatacattagaaagttacatgatgagcttactggccacatgttggacatgtatt |
| | | ccgtaatgctaactaatgataacacctcacggtactgggaacctgagttttatgaggctatgtacacaccacatacagtcttgcaggctgtaggtgctt |
| | | gtgtattgtgcaattcacagacttcacttcgttgcggtgcctgtattaggagaccattcctatgttgcaagtgctgctatgaccatgtcatttcaacat |
| | | cacacaaattagtgttgtctgttaatccctatgtttgcaatgccccaggttgtgatgtcactgatgtgacacaactgtatctaggaggtatgagctatt |
| | | attgcaagtcacataagcctcccattagttttccattatgtgctaatggtcaggtttttggtttatacaaaaacacatgtgtaggcagtgacaatgtca |
| | | ctgacttcaatgcgatagcaacatgtgattggactaatgctggcgattacatacttgccaacacttgtactgagagactcaagcttttcgcagcagaaa |
| | | cgctcaaagccactgaggaaacatttaagagtcatatggtattgccactgtacgcgaagtactctctgacagagaattgcatctttcatgggaggttgg |
| | | aaaacctagaccaccattgaacagaaactatgtattactggttaccgtgtaactaaaaatagtaaagtacagattggagagtacacctttgaaaaaggt |
| | | gactatggtgatgctgttgtgtacagaggtactacgacatacaagttgaatgttggtgattactttgtgttgacatctcacactgtaatgccacttagt |
| | | gcacctactctagtgccacaagagcactatgtgagaattactggcttgtacccaacactcaacatctcagatgagttttctagcaatgttgcaaattat |
| | | caaaaggtcggcatgcaaaagtactctacactccaaggaccacctggtactggtaagagtcattttgccatcggacttgactctattacccatctgctc |
| | | gcatagtgtatacggcatgactcatgcagctgttgatgccctatgtgaaaaggcattaaaatatttgcccatagataaatgtagtagaatcatacctgc |
| | | gcgtgcgcgcgtagagtgttttgataaattcaaagtgaattcaacactagaacagtatgttttctgcactgtaaatgcattgccagaaacaactgctga |
| | | cattgtagtctttgatgaaatctctatggctactaattatgacttgagtgttgtcaatgctagacttcgtgcaaaacactacgtctatattggcgatcc |
| | | tgctcaattaccagccccccgcacattgctgactaaaggcacactagaaccagaatattttaattcagtgtgcagacttatgaaaacaataggtccaga |
| | | catgttccttggaacttgtcgccgttgtcctgctgaaattgttgacactgtgagtgctttagtttatgacaataagctaaaagcacacaaggataagtc |
| | | agctcaatgcttcaaaatgttctacaaaggtgttattacacatgatgtttcatctgcaatcaacagacctcaaataggcgttgtaagagaatttcttac |
| | | acgcaatcctgcttggagaaaagctgtttttatctcaccttataattcacagaacgctgtagcttcaaaaatcttaggattgcctacgcagactgttga |
| | | ttcatcacagggttctgaatatgactatgtcatattcacacaaactactgaaacagcacactcttgtaatgtcaaccgcttcaatgtggctatcacaag |
| | | ggcaaaaattggcattttgtgcataatgtctgatagagatctttatgacaaactgcaatttacaagtctagaaataccacgtcgcaatgtggctacatt |
| | | acaagcagaaaatgtaactggactttttaaggactgtagtaagatcattactggtcttcatcctacacaggcacctacacacctcagcgttgatataaa |
| | | gttcaagactgaaggattatgtgttgacataccaggcataccaaaggacatgacctaccgtagactcatctctatgatgggtttcaaaatgaattacca |
| | | agtcaatggttaccctaatatgtttatcacccgcgaagaagctattcgtcacgttcgtgcgtggattggctttgatgtagagggctgtcatgcaactag |
| | | agatgctgtgggtactaacctacctctccagctaggattttctacaggtgttaacttagtagctgtaccgactggttatgttgacactgaaaataacac |
| | | agaattcaccagagttaatgcaaaacctccaccaggtgaccagtttaaacatcttataccactcatgtataaaggcttgccctggaatgtagtgcgtat |
| | | taagatagtacaaatgctcagtgatacactgaaaggattgtcagacagagtcgtgttcgtcctttgggcgcatggctttgagcttacatcaatgaagta |
| | | ctttgtcaagattggacctgaaagaacgtgttgtctgtgtgacaaacgtgcaacttgatttctacttcatcagatacttatgcctgctggaatcattct |
| | | gtgggttttgactatgtctataacccatttatgattgatgttcagcagtggggctttacgggtaaccttcagagtaaccatgaccaacattgccaggta |
| | | catggaaatgcacatgtggctagttgtgatgctatcatgactagatgtttagcagtccatgagtgattgttaagcgcgttgattggtctgttgaatacc |
| | | ctattataggagatgaactgagggttaattctgcttgcagaaaagtacaacacatggttgtgaagtctgcattgcttgctgataagtttccagttcttc |
| | | atgacattggaaatccaaaggctatcaagtgtgtgcctcaggctgaagtagaatggaagttctacgatgctcagccatgtagtgacaaagcttacaaaa |
| | | tagaggaactcttctattcttatgctacacatcacgataaattcactgatggtgtttgtttgttttggaattgtaacgttgatcgttacccagccaatg |
| | | caattgtgtgtaggtttgacacaagagtcttgtcaaacttgaacttaccaggctgtgatggtggtagtttgtatgtgaataagcatgcattccacactc |
| | | cagctttcgataaaagtgcatttactaatttaaagcaattgcctttcttttactattctgatagtccttgtgagtctcatggcaaacaagtagtgtcgg |
| | | atattgattatgttccactcaaatctgctacgtgtattacacgatgcaatttaggtggtgctgtttgcagacaccatgcaaatgagtaccgacagtact |
| | | tggatgcatataatatgatgatttctgctggatttagcctatggatttacaaacaatttgatacttataacctgtggaatacatttaccaggttacaga |
| | | gtttagaaaatgtggcttataatgttgttaataaaggacactttgatggacacgccggcgaagcacctgtttccatcattaataatgctgtttacacaa |
| | | aggtagatggtattgatgtggagatctttgaaaataagacaacacttcctgttaatgttgcatttgagctttgggctaagcgtaacattaaaccagtgc |
| | | cagagattaagatactcaataatttgggtgttgatatcgctgctaatactgtaatctgggactacaaaagagaagccccagcacatgtatctacaatag |
| | | gtgtctgcacaatgactgacattgccaagaaacctactgagagtgcttgttcttcacttactgtcttgtttgatggtagagtggaaggacaggtagacc |
| | | tttttagaaacgcccgtaatggtgttttaataacagaaggttcagtcaaaggtctaacaccttcaaagggaccagcacaagctagcgtcaatggagtca |
| | | cattaattggagaatcagtaaaaacacagtttaactactttaagaaagtagacggcattattcaacagttgcctgaaacctactttactcagagcagag |
| | | acttagaggattttaagcccagatcacaaatggaaactgactttctcgagctcgctatggatgaattcatacagcgatataagctcgagggctatgcct |
| | | tcgaacacatcgtttatggagatttcagtcatggacaacttggcggtcttcatttaatgataggcttagccaagcgctcacaagattcaccacttaaat |
| | | tagaggattttatccctatggacagcacagtgaaaaattacttcataacagatgcgcaaacaggttcatcaaaatgtgtgtgttctgtgattgatcttt |
| | | tacttgatgactttgtcgagataataaagtcacaagatttgtcagtgatttcaaaagtggtcaaggttacaattgactatgctgaaatttcattcatgc |
| | | tttggtgtaaggatggacatgttgaaaccttctacccaaaactacaagcaagtcaagcgtggcaaccaggtgttgcgatgcctaacttgtacaagatgc |
| | | aaagaatgcttcttgaaaagtgtgaccttcagaattatggtgaaaatgctgttataccaaaaggaataatgatgaatgtcgcaaagtatactcaactgt |
| | | gtcaatacttaaatacacttactttagctgtaccctacaacatgagagttattcactttggtgctggctctgataaaggagttgcaccaggtacagctg |
| | | tgctcagacaatggttgccaactggcacactacttgtcgattcagatcttaatgacttcgtaccgacgcagattctactttaattggagactgtgcaac |
| | | agtacatacggctaataaatgggaccttattattagcgatatgtatgaccctaggaccaaacatgtgacaaaagagaatgactctaaagaagggttttt |
| | | cacttatctgtgtggatttataaagcaaaaactagccctgggtggttctatagctgtaaagataacagagcattcttggaatgctgacctttacaagct |
| | | tatgggccatttctcatggtggacagcttttgttacaaatgtaaatgcatcatcatcggaagcatttttaattggggctaactatcttggcaagccgaa |
| | | ggaacaaattgatggctataccatgcatgctaactacattttctggaggaacacaaatcctatccagttgtcttcctattcactctttgacatgagcaa |
| | | atttcctcttaaattaagaggaactgctgtaatgtctcttaaggagaatcaaatcaatgatatgatttattctcttctggaaaaaggtaggcttatcat |
| | | tagagaaaacaacagagttgtggtttcaagtgatattcttgttaacaactaaacgaacatgtttattttcttattatttcttactctcactagtggtag |
| | | tgaccttgaccggtgcaccacttttgatgatgttcaagctcctaattacactcaacatacttcatctatgaggggggtttactatcctgatgaaatttt |
| | | tagatcagacactattatttaactcaggatttatttcttccattttattctaatgttacagggtttcatactattaatcatacgtttggcaaccctgtc |
| | | ataccttttaaggatggtatttattttgctgccacagagaaatcaaatgttgtccgtggttgggtttttggttctaccatgaacaacaagtcacagtcg |
| | | gtgattattattaacaattctactaatgttgttatacgagcatgtaactttgaattgtgtgacaaccattattgctgtttctaaacccatgggtacaca |
| | | gacacatactatgatattcgataatgcatttaattgcactttcgagtacatatctgatgccttttcgcttgatgtttcagaaaagtcaggtaattttaa |
| | | acacttacgagagtttgtgtttaaaaataaagatgggtttctctatgtttataagggctatcaacctatagatgtagttcgtgatctaccttctggttt |
| | | taacactttgaaacctatttttaagttgcctcttggtattaacattacaaattttagagccattcttacagccttttcacctgctcaagacatttgggg |
| | | cacgtcagctgcagcctattttgttggctatttaaagccaactacatttatgctcaagtatgatgaaaatggtacaatcacagatgctgttgattgttc |
| | | tcaaaatccacttgctgaactcaaatgctctgttaagagattgagattgacaaaggaatttaccagacctctaatttcagggttgttccctcaggagat |
| | | gttgtgagattccctaatattacaaacttgtgtccttttggagaggtttttaatgctactaaattcccttctgtctatgcatgggagagaaaaaaaatt |
| | | tctaattgtgttgctgattactctgtgctctacaactcaacatttttttcaacctttaagtgctatggcgtttctgccactaagttgaatgatctttgc |
| | | ttctccaatgtctatgcagattcttttgtagtcaagggagatgatgtaagacaaatagcgccaggacaaactggtgttattgctgattataattataaa |
| | | ttgccagatgatttcatgggttgtgtccttgcttggaatactaggaacattgatgctacttcaactggtaattataattataaatataggtatcttaga |
| | | catggcaagcttaggccctttgagagagacatatctaatgtgcctttctcccctgatggcaaaccttgcaccccacctgctcttaattgttattggcca |
| | | ttaaatgattatggtttttacaccactactggcattggctaccaaccttacagagttgtagtactttcttttgaacttttaaatgcaccggccacggtt |
| | | tgtggaccaaaattatccactgaccttattaagaaccagtgtgtcaattttaattttaatggactcactggtactggtgtgttaactccttcttcaaag |
| | | agatttcaaccatttcaacaatttggccgtgatgtttctgatttcactgattccgttcgagatcctaaaacatctgaaatattagacatttcaccttgc |
| | | gcttttgggggtgtaagtgtaattacacctggaacaaatgcttcatctgaagttgctgttctatatcaagatgttaactgcactgatgtttctacagca |
| | | attcatgcagatcaactcacaccagcttggcgcatatattctactggaaacaatgtattccagactcaagcaggctgtcttataggagctgagcatgtc |
| | | gacacttcttatgagtgcgacattcctattggagctggcatttgtgctagttaccatacagtttctttattacgtagtactagccaaaaatctattgtg |
| | | gcttatactatgtctttaggtgctgatagttcaattgcttactctaataacaccattgctatacctactaacttttcaattagcattactacagaagta |
| | | atgcctgtttctatggctaaaacctccgtagattgtaatatgtacatctgcggagattctactgaatgtgctaatttgcttctccaatatggtagattt |
| | | gcacacaactaaatcgtgcactctcaggtattgctgctgaacaggatcgcaacacacgtgaagtgttcgctcaagtcaaacaaatgtacaaaaccccaa |
| | | ctttgaaatattttggtggttttaatttttcacaaatattacctgaccctctaaagccaactaagaggtcttttattgaggacttgctctttaataagg |
| | | tgacactcgctgatgctggcttcatgaagcaatatggcgaatgcctaggtgatattaatgctagagatctcatttgtgcgcagaagttcaatggactta |
| | | cagtgttgccacctctgctcactgatgatatgattgctgcctacactgctgctctagttagtggtactgccactgctggatggacatttggtgctggcg |
| | | ctgctcttcaaataccttttgctatgcaaatggcatataggttcaatggcattggagttacccaaaatgttctctatgagaaccaaaaacaaatcgcca |
| | | accaatttaacaaggcgattagtcaaattcaagaatcacttacaacaacatcaactgcattgggcaagctgcaagacgttgttaaccagaatgctcaag |
| | | cattaaacacacttgttaaacaacttagctctaattttggtgcaatttcaagtgtgctaaatgatatcctttcgcgacttgataaagtcgaggcggagg |
| | | tacaaattgacaggttaattacaggcagacttcaaagccttcaaacctatgtaacacaacaactaatcagggctgctgaaatcagggcttctgctaatc |
| | | ttgctgctactaaaatgtctgagtgtgttcttggacaatcaaaaagagttgacttttgtggaaagggctaccaccttatgtccttcccacaagcagccc |
| | | cgcatggtgttgtcttcctacatgtcacgtatgtgccatcccaggagaggaacttcaccacagcgccagcaatttgtcatgaaggcaaagcatacttcc |
| | | ctcgtgaaggtgtttttgtgtttaatggcacttcttggtttattacacagaggaacttcttttctccacaaataattactacagacaatacatttgtct |
| | | caggaaattgtgatgtcgttattggcatcattaacaacacagtttatgatcctctgcaacctgagcttgactcattcaaagaagagctggacaagtact |
| | | tcaaaaatcatacatcaccagatgttgatcttggcgacatttcaggcattaacgcttctgtcgtcaacattcaaaaagaaattgaccgcctcaatgagg |
| | | tcgctaaaaatttaaatgaatcactcattgaccttcaagaattgggaaaatatgagcaatatattaaatggccttggtatgtttggctcggcttcattg |
| | | ctggactaattgccatcgtcatggttacaatcttgattgttgcatgactagttgttgcagttgcctcaagggtgcatgctcttgtggttcttgctgcaa |
| | | gtttgatgaggatgactctgagccagttctcaagggtgtcaaattacattacacataaacgaacttatggatttgtttatgagattttttactcttaga |
| | | tcaattactgcacagccagtaaaaattgacaatgcttctcctgcaagtactgttcatgctacagcaacgataccgctacaagcctcactccattcggat |
| | | ggcttgttattggcgttgcatttcttgctgtttttcagagcgctaccaaaataattgcgctcaataaaagatggcagctagccattataagggcttcca |
| | | gttcatttgcaatttactgctgctatttgttaccatctattcacatcttttgcttgtcgctgcaggtatggaggcgcaatttttgtacctctatgcctt |
| | | gatatattttctacaatgcatcaacgcatgtagaattattatgagatgttggctttgttggaagtgcaaatccaagaacccattactttatgatgccaa |
| | | ctactttgtttgctggcacacacataactatgactactgtataccatataacagtgtcacagatacaattgtcgttactgaaggtgacggcatttcaac |
| | | accaaaactcaaagaagactaccaaattggtggttattctgaggataggcactcaggtgttaaagactatgtcgttgtacatggctatttcaccgaagt |
| | | ttactaccagcttgagtctacacaaattactacagacactggtattgaaaatgctacattcttcatctttaacaagcttgttaaagacccaccgaatgt |
| | | gcaaatacacacaatcgacggctcttcaggagttgctaatccagcaatggatccaatttatgatgagccgacgacgactactagcgtgcctttgtaagc |
| | | acaagaaagtgagtacgaacttatgtactcattcgtttcggaagaaacaggtacgttaatagttaatagcgtacttctttttcttgattcgtggtattc |
| | | ttgctagtcacactagccatccttactgcgcttcgattgtgtgcgtactgctgcaatattgttaacgtgagtttagtaaaaccaacggtttacgtctac |
| | | tcgcgtgttaaaaatctgaactcttctgaaggagttcctgatcttctggtctaaacgaactaactattattattattctgtttggaactttaacattgc |
| | | ttatcatggcagacaacggtactattaccgttgaggagcttaaacaactcctggaacaatggaacctagtaataggtttcctattcctagcctggatta |
| | | tgttactacaatttgcctattctaatcggaacaggtttttgtacataataaagcttgttttcctaggctcttgtggccagtaacacttgcttgttttgt |
| | | gcttgctgctgtctacagaattaattgggtgactggcgggattgcgattgcaatggcttgtattgtaggcttgatgtggcttagctacttcgttgcttc |
| | | cttcaggctgtttgctcgtacccgctcaatgtggtcattcaacccagaaacaaacattcttctcaatgtgcctctccgggggacaattgtgaccagacc |
| | | gctcatggaaagtgaacttgtcattggtgctgtgatcattcgtggtcacttgcgaatggccggacactccctagggcgctgtgacattaaggacctgcc |
| | | aaaagagatcactgtggctacatcacgaacgattcttattacaaattaggagcgtcgcagcgtgtaggcactgattcaggttttgctgcatacaaccgc |
| | | taccgtattggaaactataaattaaatacagaccacgccggtagcaacgacaatattgattgctagtacagtaagtgacaacagatgtttcatcttgtt |
| | | gacttccaggttacaatagcagagatattgattatcattatgaggactttcaggattgctatttggaatcttgacgttataataagttcaatagtgaga |
| | | caattatttaagcctctaactaagaagaattattcggagttagatgatgaagaacctatggagttagattatccataaaacgaacatgaaaattattct |
| | | cttcctgacattgattgtatttacatcttgcgagctatatcactatcaggagtgtgttagaggtacgactgtactactaaaagaaccttgcccatcagg |
| | | aacatacgagggcaattcaccatttcaccctcttgctgacaataaatttgcactaacttgcactagcacacactttgatttgcttgtgctgacggtact |
| | | cgacatacctatcagctgcgtgcaagatcagtttcaccaaaacttttcatcagacaagaggaggttcaacaagagctctactcgccactttttctcatt |
| | | gttgctgctctagtatttttaatactttgcttcaccattaagagaaagacagaatgaatgagctcactttaattgacttctatttgtgctttttagcct |
| | | ttctgctattccttgttttaataatgcttattatattttggttttcactcgaaatccaggatctagaagaaccttgtaccaaagtctaaacgaacatga |
| | | aacttctcattgttttgacttgtatttctctatgcagttgcatatgcactgtagtacagcgctgtgcatctaataaacctcatgtgcttgaagatcctt |
| | | gtaaggtacaacactaggggtaatacttatagcactgcttggctttgtgctctaggaaaggttttaccttttcatagatggcacactatggttcaaaca |
| | | tgcacacctaatgttactatcaactgtcaagatccagctggtggtgcgcttatagctaggtgttggtaccttcatgaaggtcaccaaactgctgcattt |
| | | agagacgtacttgttgttttaaataaacgaacaaattaaaatgtctgataatggaccccaatcaaaccaacgtagtgccccccgcattacatttggtgg |
| | | acccacagattcaactgacaataaccagaatggaggacgcaatggggcaaggccaaaacagcgccgaccccaaggtttacccaataatactgcgtatgg |
| | | ttcacagctctcactcagcatggcaaggaggaacttagattccctcgaggccagggcgttccaatcaacaccaatagtggtccagatgaccaaattggc |
| | | tactaccgaagagctacccgacgagttcgtggtggtgacggcaaaatgaaagagctcagccccagatggtacttctattacctaggaactggcccagaa |
| | | gcttcacttccctacggcgctaacaaagaaggcatcgtatgggttgcaactgagggagccttgaatacacccaaagaccacattggcacccgcaatcct |
| | | aataacaatgctgccaccgtgctacaacttcctcaaggaacaacattgccaaaaggcttctacgcagagggaagcagaggcggcagtcaagcctcttct |
| | | cgctcctcatcacgtagtcgcggtaattcaagaaattcaactcctggcagcagtaggggaaattctcctgctcgaatggctagcggaggtggtgaaact |
| | | gccctcgcgctattgctgctagacagattgaaccagcttgagagcaaagtttctggtaaaggccaacaacaacaaggccaaactgtcactaagaaatct |
| | | gctgctgaggcatctaaaaagcctcgccaaaaacgtactgccacaaaacagtacaacgtcactcaagcatttgggagacgtggtccagaacaaacccaa |
| | | ggaaatttcggggaccaagacctaatcagacaaggaactgattacaaacattggccgcaaattgcacaatttgctccaagtgcctctgcattctttgga |
| | | atgtcacgcattggcatggaagtcacaccttcgggaacatggctgacttatcatggagccattaaattggatgacaaagatccacaattcaaagacaac |
| | | gtcatactgctgaacaagcacattgacgcatacaaaacattcccaccaacagagcctaaaaaggacaaaaagaaaaagactgatgaagctcagcctttg |
| | | ccgcagagacaaaagaagcagcccactgtgactcttcttcctgcggctgacatggatgatttctccagacaacttcaaaattccatgagtggagcttct |
| | | gctgattcaactcaggcataaacactcatgatgaccacacaaggcagatgggctatgtaaacgttttcgcaattccgtttacgatacatagtctactct |
| | | tgtgcagaatgaattctcgtaactaaacagcacaagtaggtttagttaactttaatctcacatagcaatctttaatcaatgtgtaacattagggaggac |
| | | ttgaaagagccaccacattttcatcgaggccacgcggagtacgatcgagggtacagtgaataatgctagggagagctgcctatatggaagagccctaat |
| | | gtgtaaaattaattttagtagtgctatccccatgtgattttaatagcttcttaggagaatgacaaaaaaaaaaaaaaaaaaaaaaaa |
| 5537 | MERS-CoV genome | gatttaagtgaatagettggctatctcacttcccctcgttctcttgcagaactttgattttaacgaacttaaataaaagccctgttgtttagcgtatcg |
| | Genbank Accession No. NC_019843.3 | ttgcacttgtctggtgggattgtggcattaatttgcctgctcatctaggcagtggacatatgctcaacactgggtataattctaattgaatactatttt |
| | | tcagttagagcgtcgtgtctcttgtacgtctcggtcacaatacacggtttcgtccggtgcgtggcaattcggggcacatcatgtctttcgtggctggtg |
| | | tgaccgcgcaaggtgcgcgcggtacgtatcgagcagcgctcaactctgaaaaacatcaagaccatgtgtctctaactgtgccactctgtggttcaggaa |
| | | acctggttgaaaaactttcaccatggttcatggatggcgaaaatgcctatgaagtggtgaaggccatgttacttaaaaaggagccacttctctatgtgc |
| | | ccatccggctggctggacacactagacacctcccaggtcctcgtgtgtacctggttgagaggctcattgcttgtgaaaatccattcatggttaaccaat |
| | | tggcttatagctctagtgcaaatggcagcctggttggcacaactttgcagggcaagcctattggtatgttcttcccttatgacatcgaacttgtcacag |
| | | gaaagcaaaatattctcctgcgcaagtatggccgtggtggttatcactacaccccattccactatgagcgagacaacacctcttgccctgagtggatgg |
| | | acgattttgaggcggatcctaaaggcaaatatgcccagaatctgcttaagaagttgattggcggtgatgtcactccagttgaccaatacatgtgtggcg |
| | | ttgatggaaaacccattagtgcctacgcatttttaatggccaaggatggaataaccaaactggctgatgttgaagcggacgtcgcagcacgtgctgatg |
| | | acgaaggcttcatcacattaaagaacaatctatatagattggtttggcatgttgagcgtaaagacgttccatatcctaagcaatctatttttactatta |
| | | atagtgtggtccaaaaggatggtgttgaaaacactcctcctcactattttactettggatgcaaaattttaacgctcaccccacgcaacaagtggagtg |
| | | gcgtttctgacttgtecctcaaacaaaaactcctttacaccttctatggtaaggagtcacttgagaacccaacctacatttaccactccgcattcattg |
| | | agtgtggaagttgtggtaatgattcctggcttacagggaatgctatccaagggtttgcctgtggatgtggggcatcatatacagctaatgatgtcgaag |
| | | tccaatcatctggcatgattaagccaaatgctcttctttgtgctacttgcccctttgctaagggtgatagctgttcttctaattgcaaacattcagttg |
| | | ctcagttggttagttacctttctgaacgctgtaatgttattgctgattctaagtecttcacacttatattggtggcgtagcttacgcctactttggatg |
| | | tgaggaaggtactatgtactttgtgcctagagctaagtctgttgtctcaaggattggagactccatctttacaggctgtactggctcttggaacaaggt |
| | | cactcaaattgctaacatgttatggaacagactcagcattcccttaactttgtgggagagttcgttgtcaacgatgttgtcctcgcaattctctctgga |
| | | accacaactaatgttgacaaaatacgccagcttctcaaaggtgtcacccttgacaagttgcgtgattatttagctgactatgacgtagcagtcactgcc |
| | | ggcccattcatggataatgctattaatgttggtggtacaggattacagtatgccgccattactgcaccttatgtagttctcactggcttaggtgagtcc |
| | | tttaagaaagttgcaaccataccgtataaggtttgcaactctgttaaggatactctggcttattatgctcacagcgtgttgtacagagtttttccttat |
| | | gacatggattctggtgtgtcatcctttagtgaactactttttgattgcgttgatctttcagtagcttctacctattttttagtccgcatcttgcaagat |
| | | aagactggcgactttatgtctacaattattacttcctgccaaactgctgttagtaagcttctagatacatgttttgaagctacagaagcaacatttaac |
| | | ttcttgttagatttggcaggattgttcagaatctttctccgcaatgcctatgtgtacacttcacaagggtttgtggtggtcaatggcaaagtttctaca |
| | | cttgtcaaacaagtgttagacttgcttaataagggtatgcaacttttgcatacaaaggtctcctgggctggttctaaaatcattgctgttatctacagc |
| | | ggcagggagtctctaatattcccatcgggaacctattactgtgtcaccactaaggctaagtccgttcaacaagatcttgacgttattttgcctggtgag |
| | | ttttccaagaagcagttaggactgctccaacctactgacaattctacaactgttagtgttactgtatccagtaacatggttgaaactgttgtgggtcaa |
| | | cttgagcaaactaatatgcatagtcctgatgttatagtaggtgactatgtcattattagtgaaaaattgtttgtgcgtagtaaggaagaagacggattt |
| | | gccttctaccctgcttgcactaatggtcatgctgtaccgactctctttagacttaagggaggtgcacctgtaaaaaaagtagcctttggcggtgatcaa |
| | | gtacatgaggttgctgctgtaagaagtgttactgtcgagtacaacattcatgctgtattagacacactacttgcttcttctagtcttagaacctttgtt |
| | | gtagataagtctttgtcaattgaggagtttgctgacgtagtaaaggaacaagtctcagacttgcttgttaaattactgcgtggaatgccgattccagat |
| | | tttgatttagacgattttattgacgcaccatgctattgctttaacgctgagggtgatgcatcctggtcttctactatgatcttctctcttcaccccgtc |
| | | gagtgtgacgaggagtgttctgaagtagaggcttcagatttagaagaaggtgaatcagagtgcatttctgagacttcaactgaacaagttgacgtttct |
| | | catgagacttctgacgacgagtgggctgctgcagttgatgaagcgttccctctcgatgaagcagaagatgttactgaatctgtgcaagaagaagcacaa |
| | | ccagtagaagtacctgttgaagatattgcgcaggttgtcatagctgacaccttacaggaaactcctgttgtgcctgatactgttgaagtcccaccgcaa |
| | | gtggtgaaacttccgtctgcacctcagactatccagcccgaggtaaaagaagttgcacctgtctatgaggctgataccgaacagacacagaatgttact |
| | | gttaaacctaagaggttacgcaaaaagcgtaatgttgaccattgtccaattttgaacataaggttattacagagtgcgttaccatagttttaggtgacg |
| | | caattcaagtagccaagtgctatggggagtctgtgttagttaatgctgctaacacacatcttaagcatggcggtggtatcgctggtgctattaatgcgg |
| | | cttcaaaaggggctgtccaaaaagagtcagatgagtatattctggctaaagggccgttacaagtaggagattcagttctcttgcaaggccattctctag |
| | | ctaagaatatcctgcatgtcgtaggcccagatgcccgcgctaaacaggatgtttctctccttagtaagtgctataaggctatgaatgcatatcctcttg |
| | | tagtcactcctcttgtttcagcaggcatatttggtgtaaaaccagagtgtatttgattatcttattagggaggctaagactagagttttagtcgtcgtt |
| | | aattcccaagatgtctataagagtcttaccatagttgacattccacagagtttgactttttcatatgatgggttacgtggcgcaatacgtaaagctaaa |
| | | gattatggttttactgtttttgtgtgcacagacaactctgctaacactaaagttcttaggaacaagggtgttgattatactaagaagtttcttacagtt |
| | | gacggtgtgcaatattattgctacacgtctaaggacactttagatgatatcttacaacaggctaataagtctgttggtattatatctatgcctttggga |
| | | tatgtgtctcatggtttagacttaatgcaagcagggagtgtcgtgcgtagagttaacgtgccctacgtgtgtctcctagctaataaagagcaagaagct |
| | | attttgatgtctgaagacgttaagttaaacccttcagaagattttataaagcacgtccgcactaatggtggttacaattcttggcatttagtcgagggt |
| | | gaactattggtgcaagacttacgcttaaataagctcctgcattggtctgatcaaaccatatgctacaaggatagtgtgttttatgttgtaaagaatagt |
| | | acagcttttccatttgaaacactttcagcatgtcgtgcgtatttggattcacgcacgacacagcagttaacaatcgaagtcttagtgactgtcgatggt |
| | | gtaaattttagaacagtcgttctaaataataagaacacttatagatcacagcttggatgcgttttctttaatggtgctgatatttctgacaccattcct |
| | | gatgagaaacagaatggtcacagtttatatctagcagacaatttgactgctgatgaaacaaaggcgcttaaagagttatatggccccgttgatcctact |
| | | ttcttacacagattctattcacttaaggctgcagtccatgggtggaagatggttgtgtgtgataaggtacgttctctcaaattgagtgataataattgt |
| | | tatcttaatgcagttattatgacacttgatttattgaaggacattaaatttgttatacctgactacagcatgcatttatgaaacataagggcggtgatt |
| | | caactgacttcatagccctcattatggcttatggcaattgcacatttggtgaccagatgatgcctctcggttacttcataccgtgcttgcaaaggctga |
| | | gttatgctgttctgcacgcatggtttggagagagtggtgcaatgtctgtggcataaaagatgttgttctacaaggcttaaaagcttgttgttacgtggg |
| | | tgtgcaaactgttgaagatctgcgtgctcgcatgacatatgtatgccagtgtggtggtgaacgtcatcggcaattagtcgaacacaccaccccctggtt |
| | | gctgctctcaggcacaccaaatgaaaaattggtgacaacctccacggcgcctgattttgtagcatttaatgtctttcagggcattgaaacggctgttgg |
| | | ccattatgttcatgctcgcctgaagggtggtcttattttaaagtttgactaggcaccgttagcaagacttcagactggaagtgcaaggtgacagatgta |
| | | cttttccccggccaaaaatacagtagcgattgtaatgtcgtacggtattctttggacggtaatttcagaacagaggttgatcccgacctatctgattct |
| | | atgttaaggatggtaaatactttacaagtgaaccacccgtaacatattcaccagctacaattttagctggtagtgtctacactaatagctgccttgtat |
| | | cgtctgatggacaacctggcggtgatgctattagtttgagttttaataaccttttagggtttgattctagtaaaccagtcactaagaaatacacttact |
| | | ccttcttgcctaaagaagacggcgatgtgttgttggctgagtttgacacttatgaccctatttataagaatggtgccatgtataaaggcaaaccaattc |
| | | tttgggtcaataaagcatcttatgatactaatcttaataagttcaatagagctagtttgcgtcaaatttttgacgtagcccccattgaactcgaaaata |
| | | aattcacacctttgagtgtggagtctacaccagttgaacctccaactgtagatgtggtagcacttcaacaggaaatgacaattgtcaaatgtaagggtt |
| | | taaataaacctttcgtgaaggacaatgtcagtttcgttgctgatgattcaggtactcccgttgttgagtatctgtctaaagaagacctacatacattgt |
| | | atgtagaccctaagtatcaagtcattgtcttaaaagacaatgtactttcttctatgcttagattgcacaccgttgagtcaggtgatattaacgttgttg |
| | | cagcttccggatctttgacacgtaaagtgaagttactatttagggcttcattttatttcaaagaatttgctacccgcactttcactgctaccactgctg |
| | | taggtagttgtataaagagtgtagtgcggcatctaggtgttactaaaggcatattgacaggctgttttagttttgccaagatgttatttatgcttccac |
| | | tagcttactttagtgattcaaaactcggcaccacagaggttaaagtgagtgattgaaaacagccggcgttgtgacaggtaatgttgtaaaacagtgttg |
| | | cactgctgctgttgatttaagtatggataagttgcgccgtgtggattggaaatcaaccctacggttgttacttatgttatgcacaactatggtattgtt |
| | | gtcttctgtgtatcacttgtatgtcttcaatcaggtcttatcaagtgatgttatgtttgaagatgcccaaggtttgaaaaagttctacaaagaagttag |
| | | agcttacctaggaatctcttctgcttgtgacggtcttgcttcagcttatagggcgaattcctttgatgtacctacattctgcgcaaaccgttctgcaat |
| | | gtgtaattggtgcttgattagccaagattccataactcactacccagctcttaagatggttcaaacacatcttagccactatgttcttaacatagattg |
| | | gttgtggtttgcatttgagactggtttggcatacatgctctatacctcggccttcaactggttgttgttggcaggtacattgcattatttctttgcaca |
| | | gacttccatatttgtagactggcggtcatacaattatgctgtgtctagtgccttctggttattcacccacattccaatggcgggtttggtacgaatgta |
| | | taatttgttagcatgcctttggcttttacgcaagttttatcagcatgtaatcaatggttgcaaagatacggcatgcttgctctgctataagaggaaccg |
| | | acttactagagttgaagcttctaccgttgtctgtggtggaaaacgtacgttttatatcacagcaaatggcggtatttcattctgtcgtaggcataattg |
| | | gaattgtgtggattgtgacactgcaggtgtggggaataccttcatctgtgaagaagtcgcaaatgacctcactaccgccctacgcaggcctattaacgc |
| | | tacggatagatcacattattatgtggattccgttacagttaaagagactgttgttcagtttaattatcgtagagacggtcaaccattctacgagcggtt |
| | | tcccctctgcgcttttacaaatctagataagttgaagttcaaagaggtctgtaaaactactactggtatacctgaatacaactttatcatctacgactc |
| | | atcagatcgtggccaggaaagtttagctaggtctgcatgtgtttattattctcaagtcttgtgtaaatcaattcttttggttgactcaagtttggttac |
| | | ttctgttggtgattctagtgaaatcgccactaaaatgtttgattcctttgttaatagtttcgtctcgctgtataatgtcacacgcgataagttggaaaa |
| | | acttatctctactgctcgtgatggcgtaaggcgaggcgataacttccatagtgtcttaacaacattcattgacgcagcacgaggccccgcaggtgtgga |
| | | gtctgatgttgagaccaatgaaattgttgactctgtgcagtatgctcataaacatgacatacaaattactaatgagagctacaataattatgtaccctc |
| | | atatgttaaacctgatagtgtgtctaccagcgatttaggtagtctcattgattgtaatgcggcttcagttaaccaaattgtcttgcgtaattctaatgg |
| | | tgcttgcatttggaacgctgctgcatatatgaaactctcggatgcacttaaacgacagattcgcattgcatgccgtaagtgtaatttagctttccggtt |
| | | aaccacctcaaagctacgcgctaatgataatatcttatcagttagattcactgctaacaaaattgttggtggtgctcctacatggtttaatgcgttgcg |
| | | tgactttacgttaaagggttatgttcttgctaccattattgtgtttctgtgtgctgtactgatgtatttgtgtttacctacattttctatggcacctgt |
| | | tgaattttatgaagaccgcatcttggactttaaagttcttgataatggtatcattagggatgtaaatcctgatgataagtgctttgctaataagcaccg |
| | | gtccttcacacaatggtatcatgagcatgttggtggtgtctatgacaactctatcacatgcccattgacagttgcagtaattgctggagttgctggtgc |
| | | tcgcattccagacgtacctactacattggcttgggtgaacaatcagataattttattgtttctcgagtctttgctaatacaggcagtgtttgctacact |
| | | cctatagatgagataccctataagagtttactgatagtggttgcattcttccatctgagtgcactatgtttagggatgcagagggccgtatgacaccat |
| | | actgccatgatcctactgttttgcctggggcttttgcgtacagtcagatgaggcctcatgttcgttacgacttgtatgatggtaacatgtttattaaat |
| | | ttcctgaagtagtatttgaaagtacacttaggattactagaactctgtcaactcagtactgccggttcggtagttgtgagtatgcacaagagggtgttt |
| | | gtattaccacaaatggctcgtgggccatttttaatgaccaccatcttaatagacctggtgtctattgtggctctgattttattgacattgtcaggcggt |
| | | tagcagtatcactgttccagcctattacttatttccaattgactacctcattggtcttgggtataggtttgtgtgcgttcctgactttgctcttctatt |
| | | atattaataaagtaaaacgtgatttgcagattacacccagtgtgctgtaattgctgttgttgctgctgttcttaatagcttgtgcatctgctttgttac |
| | | ctctataccattgtgtatagtaccttacactgcattgtactattatgctacattctattttactaatgagcctgcatttattatgcatgtttcttggta |
| | | cattatgttcgggcctatcgttcccatatggatgacctgcgtctatacagttgcaatgtgattagacacttcttctgggttttagcttattttagtaag |
| | | aaacatgtagaagtttttactgatggtaagcttaattgtagtttccaggacgctgcctctaatatctttgttattaacaaggacacttatgcagctctt |
| | | agaaactctttaactaatgatgcctattcacgatttttggggttgtttaacaagtataagtacttactggtgctatggaaacagccgcttatcgtgaag |
| | | ctgcagcatgtcatcttgctaaagccttacaaacatacagcgagactggtagtgatcttctttaccaaccacccaactgtagcataacctaggcgtgtt |
| | | gcaaagcggtttggtgaaaatgtcacatcccagtggagatgttgaggcttgtatggttcaggttacctgcggtagcatgactcttaatggtctttggct |
| | | tgacaacacagtctggtgcccacgacacgtaatgtgcccggctgaccagttgtctgatcctaattatgatgccttgttgatttctatgactaatcatag |
| | | tttcagtgtgcaaaaacacattggcgctccagcaaacttgcgtgttgttggtcatgccatgcaaggcactcttttgaagttgactgtcgatgttgctaa |
| | | ccctagcactccagcctacacttttacaacagtgaaacctggcgcagcatttagtgtgttagcatgctataatggtcgtccgactggtacattcactgt |
| | | tgtaatgcgccctaactacacaattaagggttcctttctgtgtggttcttgtggtagtgttggttacaccaaggagggtagtgtgatcaatttctgtta |
| | | catgcatcaaatggaacttgctaatggtacacataccggttcagcatttgatggtactatgtatggtgcctttatggataaacaagtgcaccaagttca |
| | | gttaacagacaaatactgcagtgttaatgtagtagcttggctttacgcagcaatacttaatggttgcgcttggtttgtaaaacctaatcgcactagtgt |
| | | tgtttcttttaatgaatgggctcttgccaaccaattcactgaatttgttggcactcaatccgttgacatgttagctgtcaaaacaggcgttgctattga |
| | | acagctgattatgcgatccaacaactgtatactgggttccagggaaagcaaatccttggcagtaccatgttggaagatgaattcacacctgaggatgtt |
| | | aatatgcagattatgggtgtggttatgcagagtggtgtgagaaaagttacatatggtactgcgcattggttgtttgcgacccttgtctcaacctatgtg |
| | | ataatcttacaagccactaaatttactttgtggaactacttgtttgagactattcccacacagttgttcccactcttatttgtgactatggccttcgtt |
| | | atgttgttggttaaacacaaacacacattttgacacttttcttgttgcctgtggctatttgtttgacttatgcaaacatagtctacgagcccactactc |
| | | ccatttcgtcagcgctgattgcagttgcaaattggcttgcccccactaatgcttatatgcgcactacacatactgatattggtgtctacattagtatgt |
| | | cacttgtattagtcattgtagtgaagagattgtacaacccatcactttctaactttgcgttagcattgtgcagtggtgtaatgtggttgtacacttata |
| | | gcattggagaagcctcaagccccattgcctatctggtttttgtcactacactcactagtgattatacgattacagtctttgttactgtcaaccttgcaa |
| | | aagtttgcacttatgccatattgcttactcaccacagcttacacttgtgt-ttccggaagtgaagatgatacttttattatacacatgtttaggtttca |
| | | tgtgtacttgctattttggtgtcttctctcttttgaaccttaagcttagagcacctatgggtgtctatgactttaaggtctcaacacaagagttcagat |
| | | tcatgactgctaacaatctaactgcacctagaaattcttgggaggctatggctctgaactttaagttaataggtattggcggtacaccttgtataaagg |
| | | ttgctgctatgcagtctaaacttacagatcttaaatgcacatctgtggttctcctctctgtgctccaacagttacacttagaggctaatagtagggcct |
| | | gggctttctgtgttaaatgccataatgatatattggcagcaacagaccccagtgaggctttcgagaaattcgtaagtctattgctactttaatgacttt |
| | | ttctggtaatgtagatcttgatgcgttagctagtgatatttttgacactcctagcgtacttcaagctactctttctgagttttcacacttagctacctt |
| | | tgctgagttggaagctgcgcagaaagcctatcaggaagctatggactctggtgacacctcaccacaagttcttaaggctttgcagaaggctgttaatat |
| | | agctaaaaacgcctatgagaaggataaggcagtggcccgtaagttagaacgtatggctgatcaggctatgacttctatgtataagcaagcacgtgctga |
| | | agacaagaaagcaaaaattgtcagtgctatgcaaactatgttgtttggtatgattaagaagctcgacaacgatgttcttaatggtatcatttctaacgc |
| | | taggaatggttgtatacctcttagtgtcatcccactgtgtgcttcaaataaacttcgcgttgtaattcctgacttcaccgtctggaatcaggtagtcac |
| | | atatccctcgcttaactacgctggggctttgtgggacattacagttataaacaatgtggacaatgaaattgttaagtcttcagatgttgtagacagcaa |
| | | tgaaaatttaacatggccacttgttttagaatgcactagggcatccacttctgccgttaagttgcaaaataatgagatcaaaccttcaggtctaaaaac |
| | | catggttgtgtctgcgggtcaagagcaaactaactgtaatactagttccttagcttattacgaacctgtgcagggtcgtaaaatgctgatggctcttct |
| | | ttctgataatgcctatctcaaatgggcgcgtgttgaaggtaaggacggatttgtcagtgtagagctacaacctccttgcaaattcttgattgcgggacc |
| | | aaaaggacctgaaatccgatatctctattttgttaaaaatcttaacaaccttcatcgcgggcaagtgttagggcacattgctgcgactgttagattgca |
| | | agctggttctaacaccgagtttgcctctaattcctcggtgttgtcacttgttaacttcaccgttgatcctcaaaaagcttatctcgatttcgtcaatgc |
| | | gggaggtgccccattgacaaattgtgttaagatgcttactcctaaaactggtacaggtatagctatatctgttaaaccagagagtacagctgatcaaga |
| | | gacttatggtggagcttcagtgtgtactattgccgtgcgcatatagaacatcctgatgtactggtgtttgtaaatataagggtaagtttgtccaaatcc |
| | | ctgctcagtgtgtccgtgaccctgtgggattttgtttgtcaaataccccctgtaatgtagtcaatattggattggatatgggtgcaattgtgactcgct |
| | | taggcaagcagcactgccccaatctaaagattccaattttttaaacgagtccggggttctattgtaaatgcccgaatagaaccctgttcaagtggtttg |
| | | tccactgatgtcgtctttagggcatttgacatctgcaactataaggctaaggttgctggtattggaaaatactacaagactaatacttgtaggtttgta |
| | | gaattagatgaccaagggcatcatttagactcctattttgtcgttaagaggcatactatggagaattatgaactagagaagcactgttacgacttgtta |
| | | cgtgactgtgatgctgtagctccccatgatttcttcatctttgatgtagacaaagttaaaacacctcatattgtacgtcagcgtttaactgagtacact |
| | | atgatggatcttgtatatgccctgaggcactttgatcaaaatagcgaagtgcttaaggctatcttagtgaagtatggttgctgtgatgttacctacttt |
| | | gaaaataaactaggtttgattttgttgaaaatcccagtgttattggtgtttatcataaacttggagaacgtgtacgccaagctatcttaaacactgtta |
| | | aattttgtgaccacatggtcaaggctggtttagtcggtgtgctcacactagacaaccaggaccttaatggcaagtggtatgattttggtgacttcgtaa |
| | | tcactcaacctggttcaggagtagctatagttgatagctactattcttatttgatgcctgtgctctcaatgaccgattgtctggccgctgagacacata |
| | | gggattgtgattttaataaaccactcattgagtggccacttactgagtatgattttactgattataaggtacaactctttgagaagtactttaaatatt |
| | | gggatcagacgtatcacgcaaattgcgttaattgtactgatgaccgttgtgtgttacattgtgctaatttcaatgtattgtttgctatgaccatgccta |
| | | agacttgtttcggacccatagtccgaaagatctttgttgatggcgtgccatttgtagtatcttgtggttatcactacaaagaattaggtttagtcatga |
| | | atatggatgttagtctccatagacataggctctctcttaaggagttgatgatgtatgccgctgatccagccatgcacattgcctcctctaacgcttttc |
| | | ttgatttgaggacatcatgttttagtgtcgctgcacttacaactggtttgacttttcaaactgtgcggcctggcaattttaaccaagacttctatgatt |
| | | tcgtggtatctaaaggtttctttaaggagggctcttcagtgacgctcaaacattttttctttgctcaagatggtaatgctgctattacagattataatt |
| | | actattcttataatctgcctactatgtgtgacatcaaacaaatgttgttctgcatggaagttgtaaacaagtacttcgaaatctatgacggtggttgtc |
| | | ttaatgcttctgaagtggttgttaataatttagacaagagtgctggccatccttttaataagtttggcaaagctcgtgtctattatgagagcatgtctt |
| | | accaggagcaagatgaactttttgccatgacaaagcgtaacgtcattcctaccatgactcaaatgaatctaaaatatgctattagtgctaagaatagag |
| | | ctcgcactgttgcaggcgtgtccatacttagcacaatgactaatcgccagtaccatcagaaaatgcttaagtccatggctgcaactcgtggagcgactt |
| | | gcgtcattggtactacaaagttctacggtggctgggatttcatgcttaaaacattgtacaaagatgttgataatccgcatcttatgggttgggattacc |
| | | ctaagtgtgatagagctatgcctaatatgtgtagaatcttcgcttcactcatattagctcgtaaacatggcacttgttgtactacaagggacagatttt |
| | | atcgcttggcaaatgagtgtgctcaggtgctaagcgaatatgttctatgtggtggtggttactacgtcaaacctggaggtaccagtagcggagatgcca |
| | | ccactgcatatgccaatagtgtctttaacattttgcaggcgacaactgctaatgtcagtgcacttatgggtgctaatggcaacaagattgttgacaaag |
| | | aagttaaagacatgcagtttgatttgtatgtcaatgtttacaggagcactagcccagaccccaaatttgttgataaatactatgatttcttaataagca |
| | | cttttctatgatgatactgtctgatgacggtgtcgtttgctataatagtgattatgcagctaagggttacattgctggaatacagaattttaaggaaac |
| | | gctgtattatcagaacaatgtctttatgtctgaagctaaatgctgggtggaaaccgatctgaagaaagggccacatgaattctgttcacagcatacgat |
| | | tatattaaggatggcgacgatggttacttccttccttatccagacccttcaagaattttgtctgccggttgattgtagatgatatcgttaagactgacg |
| | | gtacactcatggtagagcggtttgtgtctttggctatagatgcttaccctctcacaaagcatgaagatatagaataccagaatgtattctgggtctact |
| | | tacagtatatagaaaaactgtataaagaccttacaggacacatgcttgacagttattctgtcatgctatgtggtgataattctgctaagttttgggaag |
| | | aggcattctatagagatctctatagttcgcctaccactttgcaggctgtcggttcatgcgttgtatgccattcacagacttccctacgctgtgggacat |
| | | gcatccgtagaccatttctctgctgtaaatgctgctatgatcatgttatagcaactccacataagatggttttgtctgtttctccttacgtttgtaatg |
| | | cccctggttgtggcgtttcagacgttactaagctatatttaggtggtatgagctacttttgtgtagatcatagacctgtgtgtagtatccactttgcgc |
| | | taatggtcttgtattcggcttatacaagaatatgtgcacaggtagtccttctatagttgaatttaataggttggctacctgtgactggactgaaagtgg |
| | | tgattacacccttgccaatactacaacagaaccactcaaactttttgctgctgagactttacgtgccactgaagaggcgtctaagcagtcttatgctat |
| | | tgccaccatcaaagaaattgttggtgagcgccaactattacttgtgtgggaggctggcaagtccaaaccaccactcaatcgtaattatgtttttactgg |
| | | ttatcatataaccaaaaatagtaaagtgcagctcggtgagtacattttcgagcgcattgattatagtgatgctgtatcctacaagtctagtacaacgta |
| | | taaactgactgtaggtgacatcttcgtacttacctctcactctgtggctaccttgacggcgcccacaattgtgaatcaagagaggtatgttaaaattac |
| | | tgggttgtacccaaccattacggtacctgaagagttcgcaagtcatgttgccaacttccaaaaatcaggttatagtaaatatgtcactgttcagggacc |
| | | acctggcactggcaaaagtcattttgctatagggttagcgatttactaccctacagcacgtgttgtttatacagcatgttcacacgcagctgttgatga |
| | | ttgtgtgaaaaagcttttaaatatttgaacattgctaaatgttcccgtatcattcctgcaaaggcacgtgttgagtgctatgacaggtttaaagttaat |
| | | gagacaaattctcaatatttgtttagtactattaatgactaccagaaacttctgccgatattctggtggttgatgaggttagtatgtgcactaattatg |
| | | atctttcaattattaatgcacgtattaaagctaagcacattgtctatgtaggagatccagcacagttgccagctcctaggactttgttgactagaggca |
| | | cattggaaccagaaaatttcaatagtgtcactagattgatgtgtaacttaggtcctgacatatttttaagtatgtgctacaggtgtcctaaggaaatag |
| | | taagcactgtgagcgctcttgtctacaataataaattgttagccaagaaggagctttcaggccagtgattaaaatactctataagggcaatgtgacgca |
| | | tgatgctagctctgccattaatagaccacaactcacatttgtgaagaattttattactgccaatccggcatggagtaaggcagtctttatttcgcctta |
| | | caattcacagaatgctgtgtctcgttcaatgctgggtcttaccactcagactgttgattcctcacagggttcagaataccagtacgttatcttctgtca |
| | | aacagcagatacggcacatgctaacaacattaacagatttaatgttgcaatcactcgtgcccaaaaaggtattctttgtgttatgacatctcaggcact |
| | | ctttgagtccttagagtttactgaattgtcttttactaattacaagctccagtctcagattgtaactggcctttttaaagattgactagagaaacttct |
| | | ggcctctcacctgcttatgcaccaacatatgttagtgttgatgacaagtataagacgagtgatgagctttgcgtgaatcttaatttacccgcaaatgtc |
| | | ccatactctcgtgttatttccaggatgggctttaaactcgatgcaacagttcctggatatcctaagcttttcattactcgtgaagaggctgtaaggcaa |
| | | gttcgaagaggataggcttcgatgttgagggtgctcatgcttcccgtaatgcatgtggcaccaatgtgcctctacaattaggattttcaactggtgtga |
| | | actttgttgttcagccagttggtgttgtagacactgagtggggtaacatgttaacgggcattgctgcacgtcctccaccaggtgaacagtttaagcacc |
| | | tcgtgcctcttatgcataagggggctgcgtggcctattgttagacgacgtatagtgcaaatgttgtcagacactttagacaaattgtctgattactgta |
| | | cgtttgtttgttgggctcatggctttgaattaacgtctgcatcatacttttgcaagataggtaaggaacagaagtgttgcatgtgcaatagacgcgctg |
| | | cagcgtactcttcacctctgcaatcttatgcctgctggactcattcctgcggttatgattatgtctacaaccattctttgtcgatgttcaacagtgggg |
| | | ttatgtaggcaatcttgctactaatcacgatcgttattgctctgtccatcaaggagctcatgtggcttctaatgatgcaataatgactcgttgtttagc |
| | | tattcattcttgttttatagaacgtgtggattgggatatagagtatccttatatctcacatgaaaagaaattgaattcctgttgtagaatcgttgagcg |
| | | caacgtcgtacgtgctgctcttcttgccggttcatttgacaaagtctatgatattggcaatcctaaaggaattcctattgttgatgaccagtggttgat |
| | | tggcattattttgatgcacagcccttgaccaggaaggtacaacagcttttctatacagaggacatggcctcaagatttgctgatgggctctgcttattt |
| | | tggaactgtaatgtaccaaaatatcctaataatgcaattgtatgcaggtttgacacacgtgtgcattctgagttcaatttgccaggttgtgatggcggt |
| | | agtttgtatgttaacaagcacgcttttcatacaccagcatatgatgtgagtgcattccgtgatctgaaacctttaccattcttttattattctactaca |
| | | ccatgtgaagtgcatggtaatggtagtatgatagaggatattgattatgtacccctaaaatctgcagtagtattacagcttgtaatttagggggcgctg |
| | | tttgtaggaagcatgctacagagtacagagagtatatggaagcatataatcttgtactgcatcaggtttccgcctttggtgttataagacctttgatat |
| | | ttataatctctggtctacttttacaaaagttcaaggtttggaaaacattgcttttaatgttgttaaacaaggccattttattggtgttgagggtgaact |
| | | acctgtagagtagtcaatgataagatcttcaccaagagtggcgttaatgacatttgtatgtttgagaataaaaccactttgcctactaatatagctttt |
| | | gaactctatgctaagcgtgctgtacgctcgcatcccgatttcaaattgctacacaatttacaagcagacatttgctacaagttcgtcctttgggattat |
| | | gaacgtagcaatatttatggtactgctactattggtgtatgtaagtacactgatattgatgttaattcagctttgaatatatgttttgacatacgcgat |
| | | aattgttcattggagaagttcatgtctactcccaatgccatctttatttctgatagaaaaatcaagaaatacccttgtatggtaggtcctgattatgct |
| | | tacttcaatggtgctatcatccgtgatagtgatgttgttaaacaaccagtgaagttctacttgtataagaaagtcaataatgagtttattgatcctact |
| | | gagtgtatttacactcagagtcgctcttgtagtgacttcctacccattctgacatggagaaagactttctatatttgatagtgatgttttcattaagaa |
| | | gtatggcttggaaaactatgatttgagcacgtagtctatggagacttctctcatactacgttaggcggtcttcacttgcttattggtttatacaagaag |
| | | caacaggaaggtcatattattatggaagaaatgctaaaaggtagctcaactattcataactattttattactgagactaacacagcggcttttaaggcg |
| | | gtgtgttctgttatagatttaaagcttgacgactttgttatgattttaaagagtcaagaccttggcgtagtatccaaggttgtcaaggttcctattgac |
| | | ttaacaatgattgagtttatgttatggtgtaaggatggacaggttcaaaccttctaccctcgactccaggcttctgcagattggaaacctggtcatgca |
| | | atgccatccctctttaaagttcaaaatgtaaaccttgaacgttgtgagcttgctaattacaagcaatctattcctatgcctcgcggtgtgcacatgaac |
| | | atcgctaaatatatgcaattgtgccagtatttaaatacttgcacattagccgtgcctgccaatatgcgtgttatacattttggcgctggttctgataaa |
| | | ggtatcgctcctggtacctcagttttacgacagtggcttcctacagatgccattattatagataatgatttaaatgagttcgtgtcagatgctgacata |
| | | actttatttggagattgtgtaactgtacgtgtcggccaacaagtggatcttgttatttccgacatgtatgatcctactactaagaatgtaacaggtagt |
| | | aatgagtcaaaggctttattattacttacctgtgtaacctcattaataataatcttgctcttggtgggtctgttgctattaaaataacagaacactctt |
| | | ggagcgttgaactttatgaacttatgggaaaatttgcttggtggactgttttctgcaccaatgcaaatgcatcctcatctgaaggattcctcttaggta |
| | | ttaattacttgggtactattaaagaaaatatagatggtggtgctatgcacgccaactatatattttggagaaattccactcctatgaatctgagtactt |
| | | actcactttttgatttatccaagtttcaattaaaattaaaaggaacaccagttcttcaattaaaggagagtcaaattaacgaactcgtaatatctctcc |
| | | tgtcgcagggtaagttacttatccgtgacaatgatacactcagtgtttctactgatgttcttgttaacacctacagaaagttacgttgatgtagggcca |
| | | gattctgttaagtagcttgtattgaggttgatatacaacagactttattgataaaacttggcctaggccaattgatgtttctaaggctgacggtattat |
| | | ataccctcaaggccgtacatattctaacataactatcacttatcaaggtctttttccctatcagggagaccatggtgatatgtatgtttactctgcagg |
| | | acatgctacaggcacaactccacaaaagttgtttgtagctaactattctcaggacgtcaaacagtttgctaatgggtttgtcgtccgtataggagcagc |
| | | tgccaattccactggcactgttattattagcccatctaccagcgctactatacgaaaaatttaccctgatttatgctgggttcttcagttggtaatttc |
| | | tcagatggtaaaatgggccgcttcttcaatcatactctagttcttttgcccgatggatgtggcactttacttagagctttttattgtattctagagcct |
| | | cgctctggaaatcattgtcctgctggcaattcctatacttatttgccacttatcacactcctgcaacagattgttctgatggcaattacaatcgtaatg |
| | | ccagtctgaactcttttaaggagtattttaatttacgtaactgcacctttatgtacacttataacattaccgaagatgagattttagagtggtttggca |
| | | ttacacaaactgctcaaggtgttcacctcttctcatctcggtatgttgatttgtacggcggcaatatgtttcaatttgccaccttgcctgtttatgata |
| | | ctattaagtattattctatcattcctcacagtattcgttctatccaaagtgatagaaaagcttgggctgccttctacgtatataaacttcaaccgttaa |
| | | ctttcctgttggatttttctgttgatggttatatacgcagagctatagactgtggttttaatgatttgtcacaactccactgctcatatgaatccttcg |
| | | atgttgaatctggagtttattcagtttcgtctttcgaagcaaaaccttctggctcagttgtggaacaggctgaaggtgttgaatgtgatttttcacctc |
| | | ttctgtaggcacacctcctcaggtttataatttcaagcgtttggtttttaccaattgcaattataatcttaccaaattgattcacttttttctgtgaat |
| | | gattttacttgtagtcaaatatctccagcagcaattgctagcaactgttattcttcactgattttggattacttttcatacccacttagtatgaaatcc |
| | | gatctcagtgttagttctgctggtccaatatcccagtttaattataaacagtccttttctaatcccacatgtttgattttagcgactgttcctcataac |
| | | cttactactattactaagcctcttaagtacagctatattaacaagtgactcgtcttattctgatgatcgtactgaagtacctcagttagtgaacgctaa |
| | | tcaatactcaccctgtgtatccattgtcccatccactgtgtgggaagacggtgattattataggaaacaactatctccacttgaaggtggtggctggct |
| | | tgttgctagtggctcaactgttgccatgactgagcaattacagatgggctttggtattacagttcaatatggtacagacaccaatagtgtttgccccaa |
| | | gcttgaatttgctaatgacacaaaaattgcctctcaattaggcaattgcgtggaatattccctctatggtgtttcgggccgtggtgtttttcagaattg |
| | | cacagctgtaggtgttcgacagcagcgctttgtttatgatgcgtaccagaatttagttggctattattctgatgatggcaactactactgtttgcgtgc |
| | | ttgtgttagtgttcctgtttctgtcatctatgataaagaaactaaaacccacgctactctatttggtagtgttgcatgtgaacacatttcttctaccat |
| | | gtctcaatactcccgttctacgcgatcaatgcttaaacggcgagattctacatatggccccdtcagacacctgttggttgtgtcctaggacttgttaat |
| | | tcctctttgttcgtagaggactgcaagttgcctcttggtcaatctctctgtgctcttcctgacacacctagtactctcacacctcgcagtgtgcgctct |
| | | gttccaggtgaaatgcgcttggcatccattgatttaatcatcctattcaggttgatcaacttaatagtagttattttaaattaagtatacccactaatt |
| | | tttcctttggtgtgactcaggagtacattcagacaaccattcagaaagttactgttgattgtaaacagtacgtttgcaatggtttccagaagtgtgagc |
| | | aattactgcgcgagtatggccagttttgttccaaaataaaccaggctctccatggtgccaatttacgccaggatgattctgtacgtaatttgtttgcga |
| | | gcgtgaaaagctctcaatcatctcctatcataccaggttttggaggtgactttaatttgacacttctagaacctgtttctatatctactggcagtcgta |
| | | gtgcacgtagtgctattgaggatttgctatttgacaaagtcactatagctgatcctggttatatgcaaggttacgatgattgcatgcagcaaggtccag |
| | | catcagctcgtgatcttatttgtgctcaatatgtggctggttacaaagtattacctcctcttatggatgttaatatggaagccgcgtatacttcatctt |
| | | tgcttggcagcatagcaggtgttggctggactgctggcttatcctcctttgctgctattccatttgcacagagtatcttttataggttaaacggtgttg |
| | | gcattactcaacaggttattcagagaaccaaaagcttattgccaataagtttaatcaggctctgggagctatgcaaacaggcttcactacaactaatga |
| | | agatttcagaaggttcaggatgctgtgaacaacaatgcacaggctctatccaaattagctagcgagctatctaatacttttggtgctatttccgcctct |
| | | attggagacatcatacaacgtcttgatgttctcgaacaggacgcccaaatagacagacttattaatggccgtttgacaacactaaatgatttgttgcac |
| | | agcagcttgttcgttccgaatcagctgctctttccgctcaattggctaaagataaagtcaatgagtgtgtcaaggcacaatccaagcgttctggatttt |
| | | gcggtcaaggcacacatatagtgtcctttgttgtaaatgcccctaatggcctttacttcatgcatgttggttattaccctagcaaccacattgaggttg |
| | | tttctgcttatggtctttgcgatgcagctaaccctactaattgtatagcccctgttaatggctactttattaaaactaataacactaggattgttgatg |
| | | agtggtcatatactggctcgtccttctatgcacctgagcccattacctcccttaatactaagtatgttgcaccacaggtgacataccaaaacatttcta |
| | | ctaacctccctcctcctcttctcggcaattccaccgggattgacttccaagatgagttggatgagtttttcaaaaatgttagcaccagtatacctaatt |
| | | ttggttccctaacacagattaatactacattactcgatcttacctacgagatgttgtctcttcaacaagttgttaaagcccttaatgagtcttacatag |
| | | accttaaagagcttggcaattatacttattacaacaaatggccgtggtacatttggcttggtttcattgctgggcttgttgccttagctctatgcgtct |
| | | tcttcatactgtgctgcactggttgtggcacaaactgtatgggaaaacttaagtgtaatcgttgttgtgatagatacgaggaatacgacctcgagccgc |
| | | ataaggttcatgttcactaattaacgaactattaatgagagttcaaagaccacccactctcttgttagtgttttcactctctcttttggtcactgcatc |
| | | ctcaaaacctctctatgtacctgagcattgtcagaattattctggttgcatgcttagggcttgtattaaaactgcccaagctgatacagctggtattat |
| | | acaaattttcgaattgacgtcccatctgcagaatcaactggtactcaatcagtttctgtcgatcttgagtcaacttcaactcatgatggtcctaccgaa |
| | | catgttactagtgtgaatctttttgacgttggttactcagttaattaacgaactctatggattacgtgtctctgcttaatcaaatttggcagaagtacc |
| | | ttaactcaccgtatactacttgtttgtacatccctaaacccacagctaagtatacacctttagttggcacttcattgcaccctgtgctgtggaactgtc |
| | | agctatcctttgctggttatactgaatctgctgttaattctacaaaagctttggccaaacaggacgcagctcagcgaatcgcttggttgctacataagg |
| | | atggaggaatccctgatggatgttccctctacctccggcactcaagtttattcgcgcaaagcgaggaagaggagccattaccaactaagaaactgcgct |
| | | acgttaagcgtagattttctcttctgcgccatgaagaccttagtgttattgtccaaccaacacactatgtcagggttacattttcagaccccaacatgt |
| | | ggtatctacgttcgggtcatcatttacactcagttcacaattggcttaaaccttatggcggccaacctgtttctgagtaccatattactctagctttgc |
| | | taaatctcactgatgaagatttagctagagatttttcacccattgcgctctttttgcgcaatgtcagatttgagctacatgagttcgccttgctgcgca |
| | | aaactcttgttcttaatgcatcagagatctactgtgctaacatacatagatttaagcctgtgtatagagttaacacggcaatccctactattaaggatt |
| | | ggcttctcgttcagggattttccattaccatagtggcctccctttacatatgtcaatctctaaattgcatgcactggatgatgttactcgcaattacat |
| | | cattacaatgccatgctttagaacttaccctcaacaaatgtttgttactcctttggccgtagatgttgtaccatacggtcttccaatcagggtaataaa |
| | | caaattgttcattcttatcccattttacatcatccaggattttaacgaactatggctttctcggcgtattatttaaacccgtccagctagtcccagttt |
| | | ctcctgcatttcatcgcattgagtctactgactctattgttttcacatacattcctgctagcggctatgtagctgattagctgtcaatgtgtgtctcat |
| | | tcccctattattactgctacgtcaagatacttgtcgtcgcagcattatcagaactatggttctctatttccttgttctgtataactttttattagccat |
| | | tgtactagtcaatggtgtacattatccaactggaagttgcctgatagccttcttagttatcctcataatactttggtttgtagatagaattcgtttctg |
| | | tctcatgctgaattcctacattccactgtttgacatgcgttcccactttattcgtgttagtacagtttcttctcatggtatggtccctgtaatacacac |
| | | caaaccattatttattagaaacttcgatcagcgttgcagctgttctcgttgtttttatttgcactcttccacttatatagagtgcacttatattagccg |
| | | ttttagtaagattagcctagtttctgtaactgacttctccttaaacggcaatgtttccactgttttcgtgcctgcaacgcgcgattcagttcctcttca |
| | | cataatcgccccgagctcgcttatcgtttaagcagctctgcgctactatgggtcccgtgtagaggctaatccattagtctctctttggacatatggaaa |
| | | acgaactatgttaccattgtccaagaacgaatagggttgttcatagtaaactttttcatttttaccgtagtatgtgctataacactcttggtgtgtatg |
| | | gctttccttacggctactagattatgtgtgcaatgtatgacaggcttcaataccctgttagttcagcccgcattatacttgtataatactggacgttca |
| | | gtctatgtaaaattccaggatagtaaaccccctctaccacctgacgagtgggtttaacgaactccttcataatgtctaatatgacgcaactcactgagg |
| | | cgcagattattgccattattaaagactggaactttgcatggtccctgatctttctcttaattactatcgtactacagtatggatacccatcccgtagta |
| | | tgactgtctatgtattaaaatgtttgttttatggctcctatggccatcttccatggcgctatcaatatttagcgccgtttatccaattgatctagcttc |
| | | ccagataatctctggcattgtagcagctgtttcagctatgatgtggatttcctactttgtgcagagtatccggctgtttatgagaactggatcatggtg |
| | | gtcattcaatcctgagactaattgccttttgaacgttccatttggtggtacaactgtcgtacgtccactcgtagaggactctaccagtgtaactgctgt |
| | | tgtaaccaatggccacctcaaaatggctggcatgcatttcggtgcttgtgactacgacagacttcctaatgaagtcaccgtggccaaacccaatgtgct |
| | | gattgattaaaaatggtgaagcggcaaagctacggaactaattccggcgttgccatttaccatagatataaggcaggtaattacaggagtccgcctatt |
| | | acggcggatattgaacttgcattgcttcgagcttaggctattagtaagagtatcttaattgattttaacgaatctcaatttcattgttatggcatcccc |
| | | tgctgcacctcgtgctgtttcctttgccgataacaatgatataacaaatacaaacctatctcgaggtagaggacgtaatccaaaaccacgagctgcacc |
| | | aaataacactgtctcttggtacactgggcttacccaacacgggaaagtccctcttacctttccacctgggcagggtgtacctcttaatgccaattctac |
| | | ccctgcgcaaaatgctgggtattggcggagacaggacagaaaaattaataccgggaatggaattaagcaactggctcccaggtggtacttctactacac |
| | | tggaactggacccgaagcagcactcccattccgggctgttaaggatggcatcgtttgggtccatgaagatggcgccactgatgctccttcaacttttgg |
| | | gacgcggaaccctaacaatgattcagctattgttacacaattcgcgcccggtactaagcttcctaaaaacttccacattgaggggactggaggcaatag |
| | | tcaatcatcttcaagagcctctagcttaagcagaaactcttccagatctagttcacaaggttcaagatcaggaaactctacccgcggcacttaccaggt |
| | | ccatctggaatcggagcagtaggaggtgatctactttaccttgatcttctgaacagactacaagcccttgagtaggcaaagtaaagcaatcgcagccaa |
| | | aagtaatcactaagaaagatgctgctgctgctaaaaataagatgcgccacaagcgcacttccaccaaaagtttcaacatggtgcaagcttttggtcttc |
| | | gcggaccaggagacctccagggaaactttggtgatcttcaattgaataaactcggcactgaggacccacgttggccccaaattgctgagcttgctccta |
| | | cagccagtgcttttatgggtatgtcgcaatttaaacttacccatcagaacaatgatgatcatggcaaccctgtgtacttccttcggtacagtggagcca |
| | | ttaaacttgacccaaagaatcccaactacaataagtggttggagatcttgagcaaaatattgatgcctacaaaaccttccctaagaaggaaaagaaaca |
| | | aaaggcaccaaaagaagaatcaacagaccaaatgtctgaacctccaaaggagcagcgtgtgcaaggtagcatcactcagcgcactcgcacccgtccaag |
| | | tgttcagcctggtccaatgattgatgttaacactgattagtgtcactcaaagtaacaagatcgcggcaatcgtttgtgtttggcaaccccatctcacca |
| | | tcgcttgtccactatgcacagaatggaatcatgttgtaattacagtgcaataaggtaattataacccatttaattgatagctatgctttattaaagtgt |
| | | gtagctgtagagagaatgttaaagactgtcacctctgcttgattgcaagtgaacagtgccccccgggaagagctctacagtgtgaaatgtaaataaaaa |
| | | atagctattattcaattagattaggctaattagatgatttgcaaaaaaaaaaaa |
| 5538 | hCoV-OC43 genome | (1) attgtgagcgatttgcgtgcgtgcatcccgcttcactgatctcttgttagatctttttgtaatctaaactttataaaaacatccactccctgtaa |
| | Genbank Accession No. NC_006213.1 | tctatgcttgtgggcgtagatttttcatagtggtgtttatattcatttctgctgttaacagattcagccagggacgtgttgtatcctaggcagtggccc |
| | | gcccataggtcacaatgtcgaagatcaacaaatacggtctcgaactacactgggctccagaatttccatggatgtttgaggacgcagaggagaagttgg |
| | | ataaccctagtagttcagaggtggatatgatttgctccaccactgcgcaaaagctggaaacagacggaatttgtcctgaaaatcatgtgatggtggatt |
| | | gtcgccgacttcttaaacaagagtgttgtgtgcagtctagcctaatacgtgaaattgttatgaatgcaagtccatatgatttggaggtgctacttcaag |
| | | atgctttgcagtcccgtgaagcagttttggttacaacccccttaggtatgtctttagaggcatgctatgtgagaggttgtaatcctaaaggatggacca |
| | | tgggtttgtttcggcgtagaagtgtgtgtaacactggtcgttgcactgttaataagcatgtggcctatcagttatatatgattgatcctgcaggtgtct |
| | | gtcttggtgcaggtcaattcgtgggttgggtcatacccttagcctttatgcctgtgcaatcccggaaatttattgttccatgggttatgtacttgcgta |
| | | agcgtggcgaaaagggtgcttacaataaagatcatggacgtggcggttttggacatgtttatgattttaaagttgaagatgcttatgaccaggtgcatg |
| | | atgagcctaagggtaagttttctaagaaggcttatgattaattagagggtatcgtggtgttaaaccacttctctatgtagaccagtatggttgtgatta |
| | | tactggtagtcttgcagatggcttagaggcttatgctgataagacattgcaagaaatgaaggcattatttcctacttggagtcaggaactcctttttga |
| | | tgtaattgtggcatggcatgttgtgcgtgatccacgttatgttatgagattgcagagtgctgctactatacgtagtgttgcatatgttgctaatcctac |
| | | tgaagacttgtgtgatggttctgttgttataaaagaacctgtgcatgtttatgcagatgactctattattttacgtcaatataatttagttgacattat |
| | | gagtcatttttatatggaggcagatacagttgtaaatgctttttatggtgttgattgaaagattgcggttttgttatgcagtttggttacattgattgc |
| | | gaacaagactcgtgtgattttaaaggttggattcctggtaacatgatagatggttttgcttgcaccacttgtggtcatgtttatgaagtaggtgatttg |
| | | atggcacaatcttcaggtgttttgcctgttaaccctgtattgcatactaagagtgcagcaggctatggtggttttggttgtaaagattcttttactctg |
| | | tatggccaaactgtagtttattttggaggttgtgtgtattggagtccagcacgtaatatatggattcctatattaaaatcctctgttaagtcatatgac |
| | | agtttggtttatactggagttttaggttgcaaggctattgtaaaggaaacaaatctcatttgcaaagctttgtaccttgattatgttcaacacaagtgt |
| | | ggcaatttacaccaacgggagttgctaggtgtttcagatgtgtggcataaacaattgctattaaatagaggtgtttataaacctctgttagagaatatt |
| | | gattattttaatatgcggcgcgctaaatttagtttagaaacttttactgtttgtgcagatggctttatgccttttcttttagatgatttagttccacgc |
| | | gcatattatttggcagtaagtggtcaagcattttgtgattatgcagataaactttgccatgccgttgtgtctaagagtaaagagttacttgatgtgtct |
| | | ctggattctttaggtgcagctatacattatttgaattctaagattgttgatttggctcaacattttagtgattttggaacaagtttcgtttctaaaatt |
| | | gttcatttctttaagacttttactactagcactgctcttgcatttgcatgggttttatttcatgttttgcatggtgcttatatagtagtggagagtgat |
| | | atatattttgttaaaaacattcctcgttatgctagtgctgttgcacaagcatttcagagtgttgctaaagttgtactggactctttaagagttactttt |
| | | attgatggcctttcttgttttaagattggacgtagaagaatttgtctttcaggcagaaaaatttatgaagttgagcgtggcttgttacattcatcccaa |
| | | ttgccattagatgtttatgatttaaccatgcctagtcaagttcagaaagccaagcaaaaacctatttatttaaaaggttctggttctgatttttcatta |
| | | gcggatagtgtagttgaagttgttacaacttcacttacaccatgtggttattctgaaccacctaaagttgcagctaaaatttgcattgtggataatgtt |
| | | tatatggccaaggctggtgacaaatattaccctgttgtggttgatgatcatgttggactcttggatcaagcatggagagttccttgtgctggaaggcgt |
| | | gttacatttaaggaacagcctacagtaaaggagattataagcatgcctaagattattaaggttttttatgagcttgacaacgattttaatactatttta |
| | | aatactgcgtgtggagtgtttgaagtggatgatactgttgatatggaggaattttatgctgtggtgattgatgccatagaagagaaactttctccatgt |
| | | aaggagcttgaaggtgtaggtgctaaagttagtgcctttttacagaaattagaggataatcccctatttttatttgatgaggctggcgaggaagttctt |
| | | gctcctaaattgtattgtgcctttacagctcctgaagatgatgactttcttgaggaaagtgatgttgaagaagatgatgtagaaggtgaggaaactgat |
| | | ttaactgtcacaagtgctggacagccttgtgttgctagtgaacaggaggagtcttctgaagtcttagaggacactttggatgatggtccaagtgtggag |
| | | acatctgattcacaagttgaagaagatgtagaaatgtcggattttgttgatcttgaatctgtgattcaggattatgaaaatgtttgttttgagttttat |
| | | actacagagccagaatttgttaaagttttgggtctgtatgtgcctaaagcaactcgcaacaattgctggttgcgatcagttttggcagtgatgcagaaa |
| | | ttgccctgtcaatttaaagataaaaatttgcaggatctttgggtgttatacaagcaacagtatagtcagttgtttgttgataccttggttaataagata |
| | | cctgctaatattgtacttccacaaggtggttatgttgctgattttgcatattggtttttaaccttatgtgattggcagtgtgttgcatactggaaatgc |
| | | attaaatgtgatttagctcttaagcttaaaggcttggatgctatgttcttttatggtgatgttgtttcacatatatgcaagtgtggtgagtctatggta |
| | | cttattgatgttgatgtgccatttacagcccactttgctcttaaagataagttgttttgtgcatttattactaagcgtattgtgtataaagcagcttgt |
| | | gttgtggatgttaatgatagtcattctatggctgttgttgatggtaaacaaattgatgatcatcgtatcactagtattactagtgataagtttgatttt |
| | | attattgggcatggtatgtcattttcaatgactacttttgaaattgcccaattgtatggttcttgtataacacctaatgtgtgttttgttaaaggtgat |
| | | ataattaaagtatctaagcttgttaaagcagaagttgttgtaaaccctgctaatggccatatggcacatggtggtggtgttgcaaaagctattgcagta |
| | | gcagctggacagcagtttgttaaagagactaccgatatggttaagtctaaaggagtttgtgctactggagattgttatgtactacagggggcaaattat |
| | | gtaaaactgtgcttaatgttgttggacctgatgcgagaacacagggtaaacaaagttatgtattgttagagcgtgtttataaacatcttaacaactatg |
| | | actgtgttgttacaactttgatctcagctggtatatttagtgtgccttctgatgtgtctttaacatatctacttggtactgctaagaaacaagttgttc |
| | | ttgttagcaataatcaagaggattttgatcttatttctaagtgtcagataactgctgttgagggcactaagaaattggcagcgcgtctttatttaatgt |
| | | tggacgttccattgtttacgaaacagatgctaataagttgattttaatcaatgacgttgcatttgtttcgacatttaatgttttacaggatgttttatc |
| | | cttaagacatgatatagcacttgatgatgatgcacgaaccttcgttcagagcaatgttgatgttgtacctgagggttggcgtgttgtcaataagtttta |
| | | tcaaattaatggtgttagaaccgttaagtattttgagtgtactggaggcatagatatatgcagccaggataaagtttttggttatgtacagcagggtat |
| | | ttttaataaggctactgttgctcaaattaaagccttgtttttggataaagtggacatcttgctaactgttgatggtgttaatttcactaataggtttgt |
| | | gcctgttggtgaaagttttggtaagagtctaggaaatgtgttttgtgatggagttaatgtcacgaagcataagtgtgatataaattataaaggtaaagt |
| | | ctttttccagtttgataatctttctagtgaagatttaaaggctgtaagaagttcctttaattttgatcagaaggaattgcttgcctattacaacatgct |
| | | tgttaattgttttaagtggcaggttgttgttaatggtaagtatttcacttttaagcaagctaataacaattgttttgttaatgtttcttgcttaatgct |
| | | ccagagtttgcatctgacatttaaaattgttcaatggcaagaggcatggcttgaatttcgttctggccgccctgctagatttgtagctttggttttggc |
| | | caaaggtgggtttaaatttggagatcctgctgattctagagatttcttgcgtgttgtgtttagtcaagttgatttgactggggcaatatgtgattttga |
| | | aattgcatgtaaatgtggtgtaaagcaggaacagcgtactggtaggacgctgttatgcattttggtacattgagtcgtgaagatcttgagattggttat |
| | | accgtggactgttcttgcggtaaaaagctaattcattgtgtacgatttgatgtaccatttttaatttgcagtaatacacctgctagtgtaaaattacct |
| | | aagggtgtaggaagtgcaaatatttttataggtgataaggttggtcattatgttcatgttaagtgtgaacaatcttatcagctttatgatgcttctaat |
| | | gttaagaaggttacagatgttactggcaagttgtcagattgtctgtatcttaaaaatttgaaacaaacttttaaatcggtgttaaccacctattatttg |
| | | gatgatgttaagaaaattgagtataaacctgacttgtcacaatattattgtgacggaggtaagtattatactcagcgtattattaaagcccaatttaaa |
| | | acattcgagaaagtagatggtgtgtatactaattttaaattgataggacacaccgtagtgacagtcttaatgctaagttgggttttgatagctctaaag |
| | | agtttgttgaatataagattactgagtggccaacagctacaggtgatgtggtgttggctactgatgatttgtatgttaagagatatgagaggggttgta |
| | | ttactittggtaaacctgttatatggttaagccatgagaaagcttccctcaattattaacatattttaatagaccttcattggttgatgataataaatt |
| | | tgatgttttaaaagtggatgatgttgacgatggtggtgacagctcagagagtggtgccaaagaaaccaaagaaatcaacattattaagttaagtggtgt |
| | | taaaaaaccatttaaggttgaagatagtgtcattgttaatgatgatactagtgaaaccaaatatgttaagagtttgtctattgttgatgtgtatgatat |
| | | gtggcttacaggttgtaagtatgttgttagaactgctaatgattgagcagagcagttaacgtacctacaatacgtaagtttataaaatttggtatgact |
| | | cttgttagtataccaattgatttgttaaatttaagagagattaagcctgctgttaatgtggttaaagctgtgcgaaataaaatttctgtatgattaatt |
| | | ttattaaatggctttttgtcttattatttggctggattaaaatatccgctgataataaagtaatctacaccacagaaattgcatcaaagcttacgtgta |
| | | agcttgtagattagatttaaaaatgcatttttgacatttaagtggagtatggttgctagaggtgcttgcattatagcgactatatttctattgtggttt |
| | | aattttatatatgccaatgtaatttttagtgatttttatttgcctaaaatcggtttcttgccgacttttgttggtaagattgcacagtggattaagaac |
| | | acttttagtcttgtaactatttgtgatctatattccattcaggatgtgggttttaagaatcagtattgtaatggaagtattgcatgtcagttctgcttg |
| | | gcaggatttgatatgttagataattataaagccattgatgtagtacagtatgaagctgataggagagcatttgttgattatacaggtgtgttaaagatt |
| | | gtcattgaattgatagttagttacgccctgtatacggcatggttttatccattgtttgccdtatcagtattcagatcttgaccacttggctgcctgagc |
| | | tttttatgcttagtacattacattggagttttaggttgctggtggctttagctaatatgttaccagcacatgtgtttatgaggttttatattattattg |
| | | cctatttattaagctctttagcttgtttaggcatgttgcctatggttgtagtaaatctggttgtttgttttgttacaagaggaatcgtagtctacgtgt |
| | | taaatgtagtactatcgttggtggcatgatacgctattacgatgttatggctaatggtggcactggcttttgttcaaaacatcaatggaattgcattga |
| | | ttgtgattcttataaaccaggtaatacttttattactgttgaggccgctcttgatctatctaaggaattgaaacggcccattcagcctacagatgttgc |
| | | ttatcatacggttactgatgttaagcaagttggttgttctatgcgcttgttctatgatcgtgatggacagcgcacatatgatgatgttaatgctagttt |
| | | gtttgtggattatagtaatttgctacattctaaggttaagagtgtgcctaatatgcatgttgtggtagtggaaaatgatgctgataaagccaattttct |
| | | gaatgctgctgtattttatgcacagtctttgtttagacctattttaatggttgataaaaatctgataactactgctaacactggtacgtagttacagaa |
| | | actatgtttgatgtttatgtggatacatttttgtctatgtttgatgtggataaaaagagtcttaatgattaatagcaactgcgcattcttctataaaac |
| | | agggtacgcagatttataaagttttggatacctttttaagctgtgctcgtaaaagttgttctattgattcagatgttgatactaagtgtttagctgatt |
| | | ctgtcatgtctgctgtatcggcaggtcttgaattgacggatgaaagttgtaataacttggtgccaacatatttgaagagtgacaacattgtggcagctg |
| | | atttaggtgttctgattcaaaattctgcaaagcatgtgcagggtaatgttgctaaaatagctggtgtttcctgtatatggtctgtggatgcttttaatc |
| | | agtttagttctgatttccagcataaattgaagaaagcatgttgtaaaactggtttgaaactgaagcttacttataataagcagatggctaatgtactgt |
| | | tttaactacaccattagtcttaaagggggtgcagtttttagttattttgtttatgtgtgttttgtgttgagtttggtagttttattggactgtggtgct |
| | | taatgcccacttacacagtacacaaatcagattttcagcttcccgtttatgccagttataaagttttagataatggtgttattagagatgttagcgttg |
| | | aagatgtttgtttcgctaacaaatttgaacaatttgatcaatggtatgagtctacatttggtctaagttattatagtaacagtatggcttgtcccattg |
| | | ttgttgctgtaatagatcaggattttggctctacagtgtttaatgtccctaccaaagtgttacgatatggttatcatgtgttgcactttattacacatg |
| | | cactttctgctgatggagtgcagtgttatacgccacatagtcaaatatcgtattctaatttttatgctagtggctgtgtgattcctctgcttgcactat |
| | | gtttacaatggccgatggtagtccacaaccttattgttatacagaggggcttatgcaaaatgcttctctgtatagttcattggtacctcacgtgcggta |
| | | taatcttgctaatgctaaaggttttatccgttttccagaagtgttgcgagaagggcttgtacgtatcgtgcgtactcgttctatgtcgtattgcagagt |
| | | tggattatgtgaggaagctgatgagggtatatgctttaattttaatggttcttgggtgcttaataatgattattatagatcattgcctgggaccttttg |
| | | tggtagagatgtttttgatttaatttatcagctatttaaaggtttagcacagcctgtggattttttggcattgactgctagttccattgctggtgctat |
| | | actcgctgtaattgttgttttggtgttttattacctaataaagcttaaacgtgatttggtgattacaccagtgttgtttttgttaacgtgattgtgtgg |
| | | tgtgtaaattttatgatgctttttgtgtttcaagtttaccccatactttcttgtgtatatgctatttgttatttttatgccacgctttatttccdtcgg |
| | | agataagtgtgataatgcacttacaatggctagttatgtatggcactattatgcctttatggttttgtttgctatatatagctgttgttgtttcaaatc |
| | | atgctttttgggtattttcttactgcagaaagcttggtacttctgttcgtagtgatggtacatttgaagaaatggctctcactacttttatgattacaa |
| | | aagattcttattgtaagcttaagaattctttgtctgatgttgcttttaatagatatttgagtttgtataataaatataggtattacagcggtaaaatgg |
| | | atactgctgcatatagggaggctgcttgactcagttggctaaagcaatggacacatttaccaataataatggtagtgatgtgctttaccaaccgcctac |
| | | tgcttccgtctcaacttcattcttgcaatctggtattgtgaaaatggtaaatcctacttctaaggtagaaccatgtgttgtcagtgttacctatggtaa |
| | | tatgacattgaatggtttatggttggatgacaaggtctactgtcccagacatgtaatatgttctgcttcagatatgactaatccagattatacaaattt |
| | | gttgtgtagagtaacatcaagtgattttactgtattgtttgatcgtctaagccttacagtgatgtcttatcaaatgcggggttgtatgcttgttcttac |
| | | agtgaccctgcaaaattctcgtacgccaaaatatacatttggtgtggttaaacctggtgagacttttactgttttagctgcttataacggcaaaccaca |
| | | aggagcctttcatgtaactatgcgtagtagttataccattaagggttcdttttatgcggatcttgtggatctgttggttatgtaataatgggtgattgt |
| | | gttaaatttgtttatatgcatcaattggagcttagtactggttgtcatactggtactgacttcaatggggatttttatggtccttataaggatgctcag |
| | | gttgttcagttgctcattcaggattatatacaatctgttaattttgtagcatggctttatgctgctatacttaacaattgtaattggtttgtacaaagt |
| | | gataagtgttctgtagaagattttaatgtgtgggctctgtccaatggatttagccaagttaaatctgaccttgttatagatgattagcttctatgactg |
| | | gtgtgtattggaaacactgttggctgctattaagcgtcttaagaatggtttccaaggacgtcagattatgggtagttgctatttgaggatgaattgaca |
| | | cctagcgatgtttatcaacaactcgctggtatcaagttacaatcaaaacgcactagattgtttaaaggcactgtttgttggattatggcttctacattt |
| | | ttgtttagttgcataattacagcatttgtgaaatggactatgtttatgtatgtaactactaatatgtttagtattacgttttgtgcactttgtgttata |
| | | agtttggccatgttgttggttaagcataagcatctttatttgactatgtatataactcctgtgcttittacactgttgtataacaactatttggttgtg |
| | | tacaagcatacatttagaggctatgtctatgcatggctatcatattatgttccatcagttgagtacacttatactgatgaagttatttatggcatgtta |
| | | ttgcttgtaggaatggtattgttacattacgtagcattaaccatgatttgttttatttataatgtttgttggtcgtttgatttctgttttctattgtgg |
| | | tacaagggttctaacttagaggaagaaattcttcttatgttggcttccattttggtacttacacatggacaacagttttatctatggctgtagcaaagg |
| | | ttattgctaagtgggttgctgtgaatgtcttgtatttcacagatatacctcaaattaagatagtgatttgtgctatttgtttattggttatattattag |
| | | ctgttattggggcttgttttccttgatgaacagtttgtttagaatgcctttgggtgtttataattataaaatttcagtacaggaattaagatatatgaa |
| | | tgctaatggattgcgccctcctaagaatagttttgaagcccttatgcttaattttaagctgttgggtattggaggtgttccaatcattgaagtatctca |
| | | atttcaatcaaaattgactgatgtcaaatgtgctaatgtcgtcttgcttaattgcttgcaacatttgcatgttgcttctaattctaagttgtggcatta |
| | | ttgtagcactttgcacaatgaaatacttgccacttcggatctgagtgttgatttgaaaagcttgctcagttattaattgttttgtttgctaatccagct |
| | | gctgtggatagcaagtgcctgactagtattgaagaagtttgcgatgattacgcaaaggacaatactgttttgcaggctttacagagtgaatttgttaat |
| | | atggctagcttcgttgaatatgaagttgctaagaaaaatcttgatgaggcgcgttttagtggttctgctaatcaacagcagttaaaacagctagagaaa |
| | | gcctgtaatattgctaaatctgcttatgaacgcgaccgtgctgtagcaaaaaagttggagcgtatggctgatttggctctcactaatatgtataaagaa |
| | | gctagaattaatgataagaagagtaaggttgtttctgccttgcaaactatgctttttagtatggtgcgtaagttagataatcaagctctgaattcaata |
| | | ttagataacgctgtgaagggttgtgtaccattgaatgcaataccttcattggcagcaaatactctgaatataattgtaccagataaaagtgtttatgac |
| | | caggtagttgataatgtctatgttacctatgcgggtaatgtatggcagattcaaactatccaggattcagatggtacaaataagcagttgaatgagata |
| | | tctgatgattgtaactggccactagttattattgcaaatcggtataatgaggtatctgctactgttttgcaaaataatgaattaatgcctgctaagttg |
| | | aaaattcaggttgttaatagtggtccagatcagacttgtaatacacctactcaatgttactataataatagtaacaatgggaagattgtttatgctata |
| | | cttagtgatgttgatggtcttaagtatacaaaaattcttaaagatgatggcaattttgttgttttggagttagatcctccttgtaaatttactgttcaa |
| | | gatgctaaaggtcttaaaattaagtacctttattttgtaaaaggttgtaacacactagcaagaggctgggttgttggtacaatttcttctacagttaga |
| | | ttgcaagctggaactgctactgaatatgcttccaactcatctatattgtctttatgtgcgttttctgtagatcctaagaaaacgtatttagattttata |
| | | caacaaggaggaacacctattgccaattgtgttaaaatgttgtgtgaccatgctggtaccggtatggccattactgttaaacccgatgctaccactagt |
| | | caggattcatatggtggtgcgtctgtttgtatatattgccgcgcacgagttgaacacccagatgttgatgggttgtgcaaattacgcggcaagtttgta |
| | | caagtgcctgtaggtataaaagatcctgtgtcttatgttttgacacatgatgtttgtcgagtttgtggattttggcgggatggaagttgttcatgtgtt |
| | | agcactgacactactgttcaatcaaaagatactaattttttaaacgggttcggggtacgagtgtagatgcccgtctcgtaccctgcgccagtggtttat |
| | | ctactgatgtacaattaagggcatttgatatttacaatgctagtgttgctggcattggtttacatttaaaagttaattgttgccgttttcagcgtgttg |
| | | atgagaacggtgataaattagatcagttattgttgttaagaggacagatctgactatatataatagagagatgaaatgctatgagcgtgtaaaagattg |
| | | taagtttgtggctgaacacgatttattacatttgatgtagaaggtagtcgtgtgccacacattgtacgcaaggatttaacaaagtatactatgttggat |
| | | ctttgctatgcattgcgacattttgatcgcaatgattgcatgctgattgtgacattctctctatatatgctggttgtgaacaatcctactttactaaga |
| | | aggattggtatgattttgttgaaaatcctgatattattaatgtgtataaaaagctaggacctatttttaatagagccctagttagcgctactgagtttg |
| | | cggacaaattggtggaggtaggcttagtaggcgttttaacacttgataatcaagatttaaatggtaaatggtatgattttggtgactatgttattgcag |
| | | ccccaggatgtggtgttgctatagcagattcttattattcttatatcatgcctatgctgaccatgtgtcatgcattggattgcgaattgtatgtgaata |
| | | atgcttatagactatttgatcttgtacagtatgattttactgattacaagcttgaattgtttaataagtattttaagcactggagtatgccatatcatc |
| | | ctaacactgttgattgtcaggatgatcggtgtattatacattgtgctaattttaacatactttttagtatggttttacctaatacatgttttgggcctc |
| | | ttgttaggcaaatttttgtggatggtgtgccttttgttgtttcaattggctaccattataaagaacttggtattgtgatgaatatggatgtggatacac |
| | | atcgttatcgcttgtctttaaaagacttgcttttatatgctgctgatccagctttgcatgtagcttctgctagtgcattgtatgatttacgcacttgct |
| | | gttttagtgttgccgctataacaagcggtgtaaaatttcaaacagttaaacctggtaattttaatcaggatttttatgattttgttttaagtaaaggcc |
| | | tgcttaaagagggtagctcagttgatctgaagcactttttattacacaggatggtaatgctgctattactgattataattattataagtataatttgcc |
| | | caccatggtggacattaagcagttgttgtttgttttggaagttgtttataagtattttgagatttatgatggtgggtgtataccggcatcacaagtcat |
| | | tgttaataattatgataagagtgctggctatccatttaacaaatttggaaaagccaggctctattatgaagcattatcatttgaggaacaggatgaaat |
| | | ttacgcttatactaagcgtaatgtcctgccaacacttactcaaatgaatttgaaatatgctattagtgctaagaatagagcccgcactgttgctggtgt |
| | | ttccatacttagtactatgactggcagaatgtttcatcaaaaatgtttgaaaagtatagcagctacacgtggtgttcctgtagttataggcaccactaa |
| | | attttatggtggctgggatgatatgttacgccgccttattaaagatgttgacaatcctgtacttatgggttgggattatcctaagtgtgatcgtgctat |
| | | gccaaacctactacgtattgttagtagtttggtattagcccgaaaacatgagacatgttgttcgcaaagcgataggttttatcgacttgcgaatgaatg |
| | | cgcacaagttttgagtgaaattgttatgtgtggtggctgttattatgttaagcctggtggcactagtagtggtgatgcaactactgatttgctaattca |
| | | gtctttaacatatgtcaagctgtttcagccaatgtatgtgccttaatgtcatgcaatggcaataagattgaagatcttagtatacgtgctcttcagaag |
| | | cgcttatactcacatgtgtatagaagtgataaggttgattcaacctttgtcacagaatattatgaatttttaaataagcattttagtatgatgattttg |
| | | agtgatgatggggttgtgtgttataattctgattatgcgtccaaagggtatattgctaatataagtgcctttcaacaggtattatattatcaaaataac |
| | | gtttttatgtcagaatccaaatgttgggttgaacatgacataaataatggacctcatgaattctgttcacaacacacaatgcttgtaaagatggatggt |
| | | gacgatgtctaccttccatatcctaatcctagtcgtatattaggagaggatgttttgtagatgatttgttaaagactgatagtgttcttttaatagaac |
| | | gatttgtaagtcttgcaatagatgcttatccacttgtgtatcatgaaaatgaagaataccaaaaggtttttcgtgtttatttggcgtatataaagaagt |
| | | tgtacaatgacctgggtaatcagatcttggatagctacagtgttattttaagtacttgtgatggacaaaagttcactgatgagtccttttacaagaaca |
| | | tgtatttaagaagtgcagttatgcagagtgttggagcttgcgtggtctgctcttctcaaacatcattacgttgtggcagttgcatcagaaagcctcttc |
| | | tttgctgcaagtgttgttatgatcatgttatggcgactgatcataaatatgtcttgagtgtttcaccatatgtgtgtaatgcaccaggatgtgatgtaa |
| | | atgatgttaccaaattgtatctaggtggtatgtcatattattgtgaagaccataagccacaatattcattcaagttggtaatgaatggtaggtttttgg |
| | | tctatataaacaatcttgtacaggatctccgtacatagacgattttaatcgtatagctagttgtaaatggaccgatgtggatgattacatactagctaa |
| | | tgaatgtacagagcgcttgaaattgtttgctgcagaaacgcaaaaggcaaccgaggaagcctttaagcagagttatgcatcagcaacaatacaagagat |
| | | tgttagtgagcgcgaattgattctctcttgggagattggaaaagttaagccaccacttaataaaaattatgtttttactggctaccattttactaaaaa |
| | | tggtaagacagttttaggtgagtatgtttttgataagagtgagttgactaatggtgtgtattatcgcgccacaaccacttataagctatctgtaggaga |
| | | tgtttttgttttaacctctcattcagtagctaatttaagtgctcctacgcttgttccgcaggagaattatagtagtattagatttgctagtgtttatag |
| | | tgtgcttgagacgtttcagaacaatgttgttaattatcaacacattggtatgaaacgttactgcaccgtgcaaggacctcctggtacagggaagtcaca |
| | | tcttgctattggtcttgctgtattctattgtacagcacgtgttgtatacacagcggccagccatgcagctgttgacgcattgtgtgaaaaagcatataa |
| | | atttttgaatataaatgattgcactcgtattgttccggccaaggtcagggtggagtgctatgataagtttaaaattaatgacaccactcgtaagtatgt |
| | | gtttactaccataaatgcattacctgagatggtgactgatattgttgttgtagatgaagttagtatgcttaccaattatgagctttctgttattaatgc |
| | | tcgtattcgcgctaagcattatgtttatattggtgatcctgctcaattgccagcaccacgtgtgttattgagcaagggtacacttgaacctaaatattt |
| | | taacactgttactaagctcatgtgttgcttagggccagacattittcttggtacatgttatagatgtcctaaggaaatcgttgatacagtgtccgcctt |
| | | ggtttatgaaaataagcttaaggctaagaatgagagtagttcattgtgttttaaggtctattataagggcgttacaacacatgaaagttctagtgctgt |
| | | aaatatgcagcagatttatttgattaataagt-ttttgaaggctaaccattgtggcataaagctgtttttattagcccatataatagtcagaactttgc |
| | | agctaagcgtgttttgggtttacaaacccaaaccgtggattctgctcaaggttctgaatatgattatgttatatattcacagactgcagaaacagcgca |
| | | ttctgtaaatgttaatcgcttcaatgttgctattactcgagccaagaaaggtattctttgtgttatgagtaatatgcagttgtttgaagcattacagtt |
| | | tactacattgaccttagataaagtgccacaggccgtcgaaactaaagttcaatgtagtactaatttatttaaagattgtagcaagagttatagcggtta |
| | | tcacccagctcatgctccttcatttttggcagtagatgacaaatataaggcaactggcgatttagccgtgtgtcttggtattggtgattctgctgttac |
| | | atattcaagattaatatcactcatgggttttaaattggatgttacccttgatgggtattgtaagctttttataactaaagaagaagagttaaacgcgtg |
| | | cgtgcctgggttggctttgatgctgaaggtgctcatgccacgcgtgatagcattgggacaaatttcccacttcaattaggattttccacaggaattgat |
| | | tttgttgtggaagccactggtttgtttgctgatagagatggttacagctttaaaaaggctgtggcgaaagctcctcctggtgaacaatttaagcacctc |
| | | atccattgatgacgagaggtcatcgctgggatgttgttagacctagaatagtacaaatgtttgcagatcatttaattgatctgtctgattgtgttgtgc |
| | | tagttacatgggcagccaactttgagctcacttgtctccgctactttgcaaaagtagggcgtgagatttcttgtaatgtatgcactaaacgtgccacag |
| | | tttacaattctagaactggttactatggttgttggcgccatagtgttacatgtgattacttgtataatccacttattgttgatattcaacagtggggat |
| | | atattggttattatcaagtaatcatgatttatattgtagtgtccataaaggagcacatgttgcttcctctgatgctataatgacacggtgtttggccgt |
| | | ttatgattgcttttgcaataatattaattggaatgtggagtatcccatcatttcaaatgagttaagtattaatacctcttgtagggtcttgcagcgtgt |
| | | gattcttaaagctgccatgctctgcaacagatatactttgtgttatgatattggcaacccaaaagcgattgcctgtgtcaaagattttgattttaagtt |
| | | ctatgatgcccaaccaattgttaagtagttaagactcttttgtattatttgaggcacataaggactcttttaaagacggtttgtgtatgttttggaact |
| | | gtaatgtggataagtatccaccgaatgcagttgtatgtagatttgacactagagtgttgaataatttaaatcttcctggctgtaatggaggtagtttgt |
| | | atgttaataaacatgcattccacactaaaccattgctagggcagcctttgagcatttgaagcctatgccattcttctattattcagatacgccttgtgt |
| | | gtatatggatggcatggatgctaagcaggttgattatgtacctttgaaatctgccacgtgcatcacaagatgcaatttaggtggtgcagtttgtttaaa |
| | | acatgctgaagagtatcgtgagtacttagagtcttacaatacagctactacagcaggttttactttttgggtctataagacatttgatttttataattt |
| | | gtggaatacgttcaccaagctacaaagcttggagaatgttgtatataatttagtcaagactggtcattatacaggacaggctggtgaaatgccttgtgc |
| | | cattataaatgataaagttgtggctaagatcgataaggaggatgttgtcatttttattaataatacaacataccctactaatgtggccgttgaattatt |
| | | tgccaagcgcagtgttcgacaccacccagagcttaagctctttagaaatttaaatatagacgtgtgttggaagcacgtcatttgggattatgctagaga |
| | | aagtatattttgcagtaatacctatggtgtctgcatgtatacagatttaaagttcattgataaattgaatgtcctttttgatggtcgtgataatggtgc |
| | | tcttgaagcttttaaacgttctaataatggcgtttacatttccacgacaaaagttaagagtctttcgatgataagaggtccaccgcgtgctgaattaaa |
| | | tggcgtagtggtggacaaggttggagacactgattgtgtgttttattttgctgtgcgtaaagaaggtcaggatgtcatcttcagccaattcgacagcct |
| | | gggagtcagctctaaccagagcccacaaggtaatctggggagtaatggtaaacccggtaatgtcggtggtaatgatgctctgtcaatctctactatctt |
| | | tacacaaagccgtgttattagctcttttacatgtcgtactgatatggaaaaagattttatagctttagatcaagatgtgtttattcagaagtatggttt |
| | | ggaggactatgcctttgaacacattgtttatggtaacttcaaccagaagattattggtggtttgcatttgttaataggcttgtaccgaagacagcaaac |
| | | ttccaatctggttgttcaggagtttgtttcatatgactccagcatacactcttattttatcactgacgagaagagtggtggtagtaagagtgtttgcac |
| | | tgttatagatattttgttggatgattttgtggctcttgttaagtcacttaatcttaattgtgtgagtaaggttgttaatgttaatgttgattttaaaga |
| | | ttttcagtttatgattggtgtaacgatgagaaagttatgactttctatcctcgtttgcaagctgcatctgactggaagcctggttattctatgcctgta |
| | | ttatataagtatttgaattctccaatggaaagagttagtctctggaattatgggaagccagttactttgcctacaggctgtatgatgaatgttgctaag |
| | | tatactcagttatgtcaatatctgaatactacaacattagctgtacctgttaatatgcgagttttgcatttaggtgcaggttcagaaaaaggagtagca |
| | | ccgggttctgcagttcttaggcagtggttgcctgctggtactattcttgtagataacgatttatacccatttgttagtgacagtgtcgctacatatttt |
| | | ggggattgtataactttaccctttgattgtcaatgggatttgataatttctgatatgtatgaccctattactaagaacataggggagtacaatgtgagt |
| | | aaagatggtttattacatacatttgtcatatgattcgagacaagttagctctgggtggcagtgttgctataaaaataacagagttttcttggaatgcag |
| | | aattatataagttaatggggtattttgcattttggactgtgttttgcacaaatgcaaatgcttcttctagtgaaggatttttaattggcataaattatt |
| | | tgtgtaagcccaaggttgagatagatggaaatgttatgcatgccaattatttgttttggagaaattccacagtttggaacgggggtgcttatagcctgt |
| | | ttgatatggctaaattcccgcttaagttggctggtactgccgtaataaatttaagagcagaccagattaatgatatggtttattcccttcttgaaaagg |
| | | gtaaactacttattagagatacaaataaagaagttttcgttggtgacagtttggttaatgtaatctaaactttaaaaatggctgtcgcttatgcagaca |
| | | agcctaatcattttatcaattttccacttacccattttcagggttttgtgttaaattataaaggtttacaatttcaaattctcgatgaaggagtggatt |
| | | gtaaaatacaaacagcgccacacattagtcttactatgctggacatacagcctgaagactataaaagtgttgatgtcgctattcaagaagttattgatg |
| | | atatgcattggggtgatggttttcagattaaatttgagaatcctcacatcctaggaagatgcatagttttagatgttaaaggtgtagaagaattgcatg |
| | | acgatttagttaattacattcgtgataaaggttgtgttgctgaccaatccaggaaatggattggccattgcaccatagctcaactcacggatgcagcac |
| | | tgtccattaaggaaaatgttgattttataaacagcatgcaattcaattataaaatcaccatcaacccctcatcaccggctagacttgaaatagttaagc |
| | | tcggtgctgaaaagaaagatggtttttatgaaaccatagttagtcactggatgggaattcgttttgaatacacatcacccactgataagctagctatga |
| | | ttatgggttattgttgtttagatgtggtacgtaaagagctagaagaaggcgatcttcccgagaatgatgatgatgcttggtttaagctatcgtaccatt |
| | | atgaaaacaattcttggttcttccgacatgtctacaggaaaagttttcatttccgtaaggcttgtcaaaatttagattgtaattgtttggggttttatg |
| | | aatcttcagttgaagaatattaaactcagtgaaaatgtttttgcttcctagatttattctagttagctgcataattggtagcttaggtttttacaaccc |
| | | tcctaccaatgttgtttcgcatgtaaatggagattggtttttatttggtgacagtcgttcagattgtaatcatattgttaatatcaacccccataatta |
| | | ttcttatatggaccttaatcctgttctgtgtgattctggtaaaatatcatctaaagctggcaactccatttttaggagttttcactttaccgattttta |
| | | taattacacaggcgaaggtcaacaaattattttttatgagggtgttaattttacgccttatcatgcattaaatgcaaccgttctggtagtaatgatatt |
| | | tggatgcagaataaaggcttgttttatactcaggtttataagaatatggctgtgtatcgcagccttacttttgttaatgtaccatatgtttataatggc |
| | | tccgcacaagctacagctctttgtaaatctggtagtttagtccttaataaccctgcatatatagctcctcaagctaactaggggattattattataagg |
| | | ttgaagctgatttttatttgtcaggttgtgacgagtatatcgtaccactttgtatttttaacggcaagtttttgtcgaatacaaagtattatgatgata |
| | | gtcaatattattttaataaagacactggtgttatttatggtctcaattctacagaaaccattaccactggttttgatcttaattgttattatttagttt |
| | | taccctctggtaattatttagccatttcaaatgagctattgttaactgttcctacgaaagcaatctgtcttaataagcgtaaggattttacgcctgtac |
| | | aggttgttgattcgcggtggaacaatgccaggcagtctgataacatgacggcggttgcttgtcaacctccgtactgttattttcgtaattctactacca |
| | | actatgttggtgtttatgatattaatcatggagatgctggttttactagcatacttagtggtttgttatataattcaccttgtttttcgcagcaaggcg |
| | | tttttaggtatgataatgttagcagtgtctggcctctctacccctatggcagatgtcccactgctgctgatattaatatccctgatttacccatttgtg |
| | | tgtatgatccgctaccagttattttgcttggcattatttgggcgttgcgattgtaattattgtagttttgttgttatattttatggtggataatgttac |
| | | taggctgcatgatgcttagaccataatctaaacatgtttttgatacttttaatttccttaccaacggcttttgctgttataggagatttaaagtgtact |
| | | tcagataatattaatgataaagacaccggtcctcctcctataagtactgatactgttgatgttactaatggtttgggtacttattatgttttagatcgt |
| | | gtgtatttaaatactacgttgtttcttaatggttattaccctacttcaggttccacatatcgtaatatggcactgaagggaagtgtactattgagcaga |
| | | ctatggtttaaaccaccatttctttctgattttattaatggtatttttgctaaggtcaaaaataccaaggttattaaagatcgtgtaatgtatagtgag |
| | | ttccctgctataactataggtagtacttttgtaaatacatcctatagtgtggtagtacaaccacgtacaatcaattcaacacaggatggtgataataaa |
| | | ttacaaggtatttagaggtctctgtttgccagtataatatgtgcgagtacccacaaacgatttgtcatcctaacctgggtaatcatcgcaaagaactat |
| | | ggcatttggatacaggtgttgtttcctgtttatataagcgtaatttcacatatgatgtgaatgctgattatttgtattttcatttttatcaagaaggtg |
| | | gtactttttatgcatattttacagacactggtgttgttactaagtttttgtttaatgtttatttaggcatggcgctttcacactattatgtcatgcctc |
| | | tgacttgtaatagtaagcttactttagaatattgggttacacctctcacttctagacaatatttactcgctttcaatcaagatggtattatttttaatg |
| | | ctgttgattgtatgagtgattttatgagtgagattaagtgtaaaacacaatctatagcaccacctactggtgtttatgaattaaacggttacactgttc |
| | | agccaatcgcagatgtttaccgacgtaaacctaatcttcccaattgcaatatagaagcttggcttaatgataagtcggtgccctaccattaaattggga |
| | | acgtaagacattttcaaattgtaattttaatatgagcagcctgatgtcttttattcaggcagactcatttacttgtaataatattgatgctgctaagat |
| | | atatggtatgtgtttttccagcataactatagataagtttgctatacccaatggcaggaaggttgacctacaattgggtaatttgggctatttgcagtc |
| | | atttaactatagaattgatactactgcaacaagttgtcagttgtattataatttacctgctgctaatgtttctgttagcaggtttaatccttctacttg |
| | | gaataagagatttggttttatagaagattctgtttttaagcctcgacctgcaggtgttcttactaatcatgatgtagtttatgcacaacactgtttcaa |
| | | agctcctaaaaatttctgtccgtgtaaattgaatggttcgtgtgtaggtagtggtcctggtaaaaataatggtataggcacttgtcctgcaggtactaa |
| | | ttatttaacttgtgataatttgtgcactcctgatcctattacatttacaggtacttataagtgcccccaaactaaatctttagttggcataggtgagca |
| | | ctgttcgggtcttgctgttaaaagtgattattgtggaggcaattcttgtacttgccgaccacaagcatttttgggttggtctgcagactcttgtttaca |
| | | aggagacaagtgtaatatttttgctaattttattttgcatgatgttaatagtggtcttacttgttctactgatttacaaaaagctaacacagacataat |
| | | tcttggtgtttgtgttaattatgacctctatggtattttaggccaaggcatttttgttgaggttaatgcgacttattataatagttggcagaacctttt |
| | | atatgattctaatggtaatctctacggttttagagactacataacaaacagaacttttatgattcgtagttgctatagcggtcgtgtttctgcggcctt |
| | | tcacgctaactcttccgaaccagcattgctatttcggaatattaaatgcaactacgtttttaataatagtcttacacgacagctgcaacccattaacta |
| | | ttttgatagttatcttggttgtgttgtcaatgcttataatagtactgctatttctgttcaaacatgtgatctcacagtaggtagtggttactgtgtgga |
| | | ttactctaaaaacagacgaagtcgtggagcgattaccactggttatcggtttactaattttgagccatttactgttaattcagtaaacgatagtttaga |
| | | acctgtaggtggtttgtatgaaattcaaataccttcagagtttactataggtaatatggtggagtttattcaaacaagctctcctaaagttactattga |
| | | ttgtgctgcatttgtctgtggtgattatgcagcatgtaaatcacagttggttgaatatggtagtttctgtgataacattaatgccatactcacagaagt |
| | | aaatgaactacttgacactacacagttgcaagtagctaatagtttaatgaatggtgttactcttagcactaagcttaaagatggcgttaatttcaatgt |
| | | agacgacatcaatttttcccctgtattaggttgtctaggcagcgaatgtagtaaagcttccagtagatctgctatagaggatttactttttgataaagt |
| | | aaagttatctgatgtcggttttgttgaggcttataataattgtacaggaggtgccgaaattagggacctcatttgtgtgcaaagttataaaggcatcaa |
| | | agtgttgcctccactgctctcagaaaatcagatcagtggatacactttggctgccacctctgctagtctatttcctccttggacagcagcagcaggtgt |
| | | accattttatttaaatgttcagtatcgcattaatgggcttggtgtcaccatggatgtgctaagtcaaaatcaaaagcttattgctaatgcatttaacaa |
| | | tgccattatgctattcaggaagggttcgatgcaactaattctgattagttaaaattcaagctgttgttaatgcaaatgctgaagctcttaataacttat |
| | | tgcaacaactctctaatagatttggtgctataagtgcttctttacaagaaattctatctagacttgatgctcttgaagcggaagctcagatagatagac |
| | | ttattaatggtcgtcttaccgctcttaatgcttatgtttctcaacagcttagtgattctacactggtaaaatttagtgcagcacaagctatggagaagg |
| | | ttaatgaatgtgtcaaaagccaatcatctaggataaatttctgtggtaatggtaatcatattatatcattagtgcagaatgctccatatggtttgtatt |
| | | ttatccactttagttatgtccctactaagtatgtcacagcgagggttagtcctggtctgtgcattgctggtgatagaggtatagctcctaagagtggtt |
| | | attttgttaatgtaaataatacttggatgtacactggtagtggttactactaccctgaacctataactgaaaataatgttgttgttatgagtacctgcg |
| | | ctgttaattatactaaagcgccgtatgtaatgctgaacacttcaatacccaaccttcctgattttaaggaagagttggatcaatggtttaaaaatcaaa |
| | | catcagtggcaccagatttgtcacttgattatataaatgttacattcttggacctacaagttgaaatgaataggttacaggaggcaataaaagtcttaa |
| | | atcagagctacatcaatctcaaggacattggtacatatgaatattatgtaaaatggccttggtatgtatggcttttaatctgccttgctggtgtagcta |
| | | tgcttgttttactattcttcatatgctgttgtacaggatgtgggactagttgttttaagaaatgtggtggttgttgtgatgattatactggataccagg |
| | | agttagtaatcaaaacttcacatgacgactaagttcgtattgattcattgcactgatctcttgttagatctttttgcaatctagcatttgttaaagttc |
| | | ttaaggccacgccctattaatggacatttggagacctgagaagaaatatctccgttatattaacggttttaatgtctcagaattagaagatgcttgttt |
| | | taaatttaactatcaatttcctaaagtaggatattgtagagttcctagtcatgcttggtgccgtaatcaaggtagattttgtgctacattcactcttta |
| | | tggtaaatccaaacattatgataaatattttggagtaataaatggtttcacagcattcgctaatactgtagaggatgctgttaacaaactggttttctt |
| | | agctgttgactttattacctggcgcagacaggagttaaatgtttatggctgatgcttatcttgcagacactgtgtggtatgtggggcaaataattttta |
| | | tagttgccatttgtttattggttacaatagttgtagtggcatttttggcaacttttaaattgtgtattcaactttgcggtatgtgtaataccttagtac |
| | | tgtccccttctatttatgtgtttaatagaggtaggcagttttatgagttttacaatgatgtaaaaccaccagtccttgatgtggatgacgtttaggtaa |
| | | tccaaacattatgagtagtaaaactacaccagcaccagtttatatctggactgctgatgaagctattaaattcctaaaggaatggaatttttattgggt |
| | | attatactactttttattacaatcatattgcaatttggatatacaagtcgcagtatgtttgtttatgttattaagatgattattttgtggcttatgtgg |
| | | ccccttactataatcttaactattttcaattgcgtatacgcattgaataatgtgtatcttggcctttctatagtttttaccatagtggccattattatg |
| | | tggattgtgtattttgtgaatagtatcaggttgtttattagaactggaagtttttggagtttcaacccagaaacaaacaacttgatgtgtatagatatg |
| | | aaaggaacaatgtatgttaggccgataattgaggactatcatactctgacggtcacaataatacgcggccatattacattcaaggtataaaactaggta |
| | | ctggctattattggcagatttgccagcttatatgactgttgctaaggttacacacctgtgcacatataagcgtggttttcttgacaggataagcgatac |
| | | tagtggttttgctgtttatgttaagtccaaagtcggtaattaccgactgccatcaacccaaaagggttctggcatggacaccgcattgttgagaaataa |
| | | tatctaaattttaaggatgtcttttactcctggtaagcaatccagtagtagagcgtcctctggaaatcgttctggtaatggcatcctcaagtgggccga |
| | | tcagtccgaccagtttagaaatgttcaaaccaggggtagaagagctcaacccaagcaaactgctacctctcagcaaccatcaggagggaatgttgtacc |
| | | ctactattcttggttctctggaattactcagtttcaaaagggaaaggagtttgagtttgtagaaggacaaggtgtgcctattgcaccaggagtcccagc |
| | | tactgaagctaaggggtactggtacagacacaacagacgttatttaaaacagccgatggcaaccagcgtcaactgctgccacgatggtatttttactat |
| | | ctgggaacaggaccgcatgctaaagaccagtacggcaccgatattgacggagtctactgggtcgctagcaaccaggctgatgtcaataccccggctgac |
| | | attgtcgatcgggacccaagtagcgatgaggctattccgactaggtttccgcctggcacggtactccctcagggttactatattgaaggctcaggaagg |
| | | tctgctcctaattccagatctacttcgcgcacatccagcagagcctctagtgcaggatcgcgtagtagagccaattctggcaatagaacccctacctag |
| | | gtgtaacacctgacatggctgatcaaattgctagtcttgttctggcaaaacttggcaaggatgccactaaacctcagcaagtaactaagcatactgcca |
| | | aagaagtcagacagaaaattttgaataagccccgccagaagaggagccccaataaacaatgcactgttcagcagtgttttggtaagagaggccctaatc |
| | | agaattttggtggtggagaaatgttaaaacttggaactagtgacccacagttccccattcttgcagaactcgcacccacagaggtgcgtttttattgga |
| | | tcaagattagagttggccaaagtgcagaatttatctgggaatcctgacgagccccagaaggatgtttatgaattgcgctataacggcgcaattaggttt |
| | | gacagtacactttcaggttttgagaccataatgaaggtgctgaatgagaatttgaatgcctatcaacaacaagatggtatgatgaatatgagtccaaaa |
| | | ccacagcgtcagcgtggtcataagaatggacaaggagaaaatgataatataagtgttgcagtgcccaaaagccgcgtgcagcaaaataagagtagagag |
| | | ttgactgcagaggacatcagcatcttaagaagatggatgagccctatactgaagacacctcagaaatataagagaatgaaccttatgtcggcatctggt |
| | | ggtaacccctcgcagaaaagtcgagataaggcactctctatcagaatggatgtcttgctgctataatagatagagaaggttatagcagactatagatta |
| | | attagttgaaagttttgtgttgtaatgtatagtgttggagaaagtgaaagacttgcggaagtaattgccgacaagtgcccaagggaagagccagcatgt |
| | | taagttaccacccagtaattagtaaatgaatgaagttaattatggccaattggaagaatcacaaaaaaaaaaaaaaaaaaaaaaaaaaaa |

The application's sequence listing, which the Patent Office published only in electronic form, follows.

SEQUENCE LISTING (5718 sequences)

SEQ ID NO: 1 - DNA, 16 bp, Artificial Sequence
  Description of Artificial Sequence: Synthetic oligonucleotide
gtcaacgacagtaatt

SEQ ID NO: 2 - DNA, 16 bp, Artificial Sequence
  Description of Artificial Sequence: Synthetic oligonucleotide
tgtcaacgacagtaat

SEQ ID NO: 3 - DNA, 16 bp, Artificial Sequence
  Description of Artificial Sequence: Synthetic oligonucleotide
acgaaaccgtaagcag

SEQ ID NO: 4 - DNA, 16 bp, Artificial Sequence
  Description of Artificial Sequence: Synthetic oligonucleotide
gacgaaaccgtaagca

SEQ ID NO: 5 - DNA, 16 bp, Artificial Sequence
  Description of Artificial Sequence: Synthetic oligonucleotide
ggacgaaaccgtaagc

SEQ ID NO: 6 - DNA, 16 bp, Artificial Sequence
  Description of Artificial Sequence: Synthetic oligonucleotide
cggacgaaaccgtaag

SEQ ID NO: 7 - DNA, 16 bp, Artificial Sequence
  Description of Artificial Sequence: Synthetic oligonucleotide
acggacgaaaccgtaa

SEQ ID NO: 8 - DNA, 16 bp, Artificial Sequence
  Description of Artificial Sequence: Synthetic oligonucleotide
cacggacgaaaccgta

SEQ ID NO: 9 - DNA, 16 bp, Artificial Sequence
  Description of Artificial Sequence: Synthetic oligonucleotide
acacggacgaaaccgt

SEQ ID NO: 10 - DNA, 16 bp, Artificial Sequence
  Description of Artificial Sequence: Synthetic oligonucleotide
aacacggacgaaaccg

SEQ ID NO: 11 - DNA, 16 bp, Artificial Sequence
  Description of Artificial Sequence: Synthetic oligonucleotide
caacacggacgaaacc

SEQ ID NO: 12 - DNA, 16 bp, Artificial Sequence
  Description of Artificial Sequence: Synthetic oligonucleotide
gcaacacggacgaaac

SEQ ID NO: 13 - DNA, 16 bp, Artificial Sequence
  Description of Artificial Sequence: Synthetic oligonucleotide
tgcaacacggacgaaa

SEQ ID NO: 14 - DNA, 16 bp, Artificial Sequence
  Description of Artificial Sequence: Synthetic oligonucleotide
ctgcaacacggacgaa

SEQ ID NO: 15 - DNA, 16 bp, Artificial Sequence
  Description of Artificial Sequence: Synthetic oligonucleotide
cccggacgaaacctag

SEQ ID NO: 16 - DNA, 16 bp, Artificial Sequence
  Description of Artificial Sequence: Synthetic oligonucleotide
acccggacgaaaccta

SEQ ID NO: 17 - DNA, 16 bp, Artificial Sequence
  Description of Artificial Sequence: Synthetic oligonucleotide
cacccggacgaaacct

SEQ ID NO: 18 - DNA, 16 bp, Artificial Sequence
  Description of Artificial Sequence: Synthetic oligonucleotide
acacccggacgaaacc

SEQ ID NO: 19 - DNA, 16 bp, Artificial Sequence
  Description of Artificial Sequence: Synthetic oligonucleotide
cacacccggacgaaac

SEQ ID NO: 20 - DNA, 16 bp, Artificial Sequence
  Description of Artificial Sequence: Synthetic oligonucleotide
tcacacccggacgaaa

SEQ ID NO: 21 - DNA, 16 bp, Artificial Sequence
  Description of Artificial Sequence: Synthetic oligonucleotide
gtcacacccggacgaa

SEQ ID NO: 22 - DNA, 16 bp, Artificial Sequence
  Description of Artificial Sequence: Synthetic oligonucleotide
ggtcacacccggacga

SEQ ID NO: 23 - DNA, 16 bp, Artificial Sequence
  Description of Artificial Sequence: Synthetic oligonucleotide
cggtcacacccggacg

SEQ ID NO: 24 - DNA, 16 bp, Artificial Sequence
  Description of Artificial Sequence: Synthetic oligonucleotide
tcggtcacacccggac

SEQ ID NO: 25 - DNA, 16 bp, Artificial Sequence
  Description of Artificial Sequence: Synthetic oligonucleotide
ttcggtcacacccgga

SEQ ID NO: 26 - DNA, 16 bp, Artificial Sequence
  Description of Artificial Sequence: Synthetic oligonucleotide
tttcggtcacacccgg

SEQ ID NO: 27 - DNA, 16 bp, Artificial Sequence
  Description of Artificial Sequence: Synthetic oligonucleotide
ctttcggtcacacccg

SEQ ID NO: 28 - DNA, 16 bp, Artificial Sequence
  Description of Artificial Sequence: Synthetic oligonucleotide
cctttcggtcacaccc

SEQ ID NO: 29 - DNA, 16 bp, Artificial Sequence
  Description of Artificial Sequence: Synthetic oligonucleotide
acctttcggtcacacc

SEQ ID NO: 30 - DNA, 16 bp, Artificial Sequence
  Description of Artificial Sequence: Synthetic oligonucleotide
tacctttcggtcacac

SEQ ID NO: 31 - DNA, 16 bp, Artificial Sequence
  Description of Artificial Sequence: Synthetic oligonucleotide
ttacctttcggtcaca

SEQ ID NO: 32 - DNA, 16 bp, Artificial Sequence
  Description of Artificial Sequence: Synthetic oligonucleotide
cttacctttcggtcac

SEQ ID NO: 33 - DNA, 16 bp, Artificial Sequence
  Description of Artificial Sequence: Synthetic oligonucleotide
tcttacctttcggtca

SEQ ID NO: 34 - DNA, 16 bp, Artificial Sequence
  Description of Artificial Sequence: Synthetic oligonucleotide
atcttacctttcggtc

SEQ ID NO: 35 - DNA, 16 bp, Artificial Sequence
  Description of Artificial Sequence: Synthetic oligonucleotide
catcttacctttcggt

SEQ ID NO: 36 - DNA, 16 bp, Artificial Sequence
  Description of Artificial Sequence: Synthetic oligonucleotide
ccatcttacctttcgg

SEQ ID NO: 37 - DNA, 16 bp, Artificial Sequence
  Description of Artificial Sequence: Synthetic oligonucleotide
tccatcttacctttcg

SEQ ID NO: 38 - DNA, 16 bp, Artificial Sequence
  Description of Artificial Sequence: Synthetic oligonucleotide
ctccatcttacctttc

SEQ ID NO: 39 - DNA, 16 bp, Artificial Sequence
  Description of Artificial Sequence: Synthetic oligonucleotide
tctccatcttaccttt

SEQ ID NO: 40 - DNA, 16 bp, Artificial Sequence
  Description of Artificial Sequence: Synthetic oligonucleotide
ctctccatcttacctt

SEQ ID NO: 41 - DNA, 16 bp, Artificial Sequence
  Description of Artificial Sequence: Synthetic oligonucleotide
gctctccatcttacct

SEQ ID NO: 42 - DNA, 16 bp, Artificial Sequence
  Description of Artificial Sequence: Synthetic oligonucleotide
ggctctccatcttacc

SEQ ID NO: 43 - DNA, 16 bp, Artificial Sequence
  Description of Artificial Sequence: Synthetic oligonucleotide
aggctctccatcttac

SEQ ID NO: 44 - DNA, 16 bp, Artificial Sequence
  Description of Artificial Sequence: Synthetic oligonucleotide
aaggctctccatctta

SEQ ID NO: 45 - DNA, 16 bp, Artificial Sequence
  Description of Artificial Sequence: Synthetic oligonucleotide
caaggctctccatctt

SEQ ID NO: 46 - DNA, 16 bp, Artificial Sequence
  Description of Artificial Sequence: Synthetic oligonucleotide
acaaggctctccatct

SEQ ID NO: 47 - DNA, 16 bp, Artificial Sequence
  Description of Artificial Sequence: Synthetic oligonucleotide
tgtgttttctcgttga

SEQ ID NO: 48 - DNA, 16 bp, Artificial Sequence
  Description of Artificial Sequence: Synthetic oligonucleotide
gtgtgttttctcgttg

SEQ ID NO: 49 - DNA, 16 bp, Artificial Sequence
  Description of Artificial Sequence: Synthetic oligonucleotide
cgtgtgttttctcgtt

SEQ ID NO: 50 - DNA, 16 bp, Artificial Sequence
  Description of Artificial Sequence: Synthetic oligonucleotide
acgtgtgttttctcgt

SEQ ID NO: 51 - DNA, 16 bp, Artificial Sequence
  Description of Artificial Sequence: Synthetic oligonucleotide
gacgtgtgttttctcg

SEQ ID NO: 52 - DNA, 16 bp, Artificial Sequence
  Description of Artificial Sequence: Synthetic oligonucleotide
ggacgtgtgttttctc

SEQ ID NO: 53 - DNA, 16 bp, Artificial Sequence
  Description of Artificial Sequence: Synthetic oligonucleotide
tggacgtgtgttttct

SEQ ID NO: 54 - DNA, 16 bp, Artificial Sequence
  Description of Artificial Sequence: Synthetic oligonucleotide
ttggacgtgtgttttc

SEQ ID NO: 55 - DNA, 16 bp, Artificial Sequence
  Description of Artificial Sequence: Synthetic oligonucleotide
gttggacgtgtgtttt

SEQ ID NO: 56 - DNA, 16 bp, Artificial Sequence
  Description of Artificial Sequence: Synthetic oligonucleotide
agttggacgtgtgttt

SEQ ID NO: 57 - DNA, 16 bp, Artificial Sequence
  Description of Artificial Sequence: Synthetic oligonucleotide
gagttggacgtgtgtt

SEQ ID NO: 58 - DNA, 16 bp, Artificial Sequence
  Description of Artificial Sequence: Synthetic oligonucleotide
tgagttggacgtgtgt

SEQ ID NO: 59 - DNA, 16 bp, Artificial Sequence
  Description of Artificial Sequence: Synthetic oligonucleotide
ctgagttggacgtgtg

SEQ ID NO: 60 - DNA, 16 bp, Artificial Sequence
  Description of Artificial Sequence: Synthetic oligonucleotide
actgagttggacgtgt

SEQ ID NO: 61 - DNA, 16 bp, Artificial Sequence
  Description of Artificial Sequence: Synthetic oligonucleotide
aactgagttggacgtg

SEQ ID NO: 62 - DNA, 16 bp, Artificial Sequence
  Description of Artificial Sequence: Synthetic oligonucleotide
aaactgagttggacgt

SEQ ID NO: 63 - DNA, 16 bp, Artificial Sequence
  Description of Artificial Sequence: Synthetic oligonucleotide
caaactgagttggacg

SEQ ID NO: 64 - DNA, 16 bp, Artificial Sequence
  Description of Artificial Sequence: Synthetic oligonucleotide
gcaaactgagttggac

SEQ ID NO: 65 - DNA, 16 bp, Artificial Sequence
  Description of Artificial Sequence: Synthetic oligonucleotide
ggcaaactgagttgga

SEQ ID NO: 66 - DNA, 16 bp, Artificial Sequence
  Description of Artificial Sequence: Synthetic oligonucleotide
aggcaaactgagttgg

SEQ ID NO: 67 - DNA, 16 bp, Artificial Sequence
  Description of Artificial Sequence: Synthetic oligonucleotide
caggcaaactgagttg

SEQ ID NO: 68 - DNA, 16 bp, Artificial Sequence
  Description of Artificial Sequence: Synthetic oligonucleotide
acaggcaaactgagtt

SEQ ID NO: 69 - DNA, 16 bp, Artificial Sequence
  Description of Artificial Sequence: Synthetic oligonucleotide
catagggctgttcaag

SEQ ID NO: 70 - DNA, 16 bp, Artificial Sequence
  Description of Artificial Sequence: Synthetic oligonucleotide
acatagggctgttcaa

SEQ ID NO: 71 - DNA, 16 bp, Artificial Sequence
  Description of Artificial Sequence: Synthetic oligonucleotide
cacatagggctgttca

SEQ ID NO: 72 - DNA, 16 bp, Artificial Sequence
  Description of Artificial Sequence: Synthetic oligonucleotide
acacatagggctgttc

SEQ ID NO: 73 - DNA, 16 bp, Artificial Sequence
  Description of Artificial Sequence: Synthetic oligonucleotide
aacacatagggctgtt

SEQ ID NO: 74 - DNA, 16 bp, Artificial Sequence
  Description of Artificial Sequence: Synthetic oligonucleotide
gaacacatagggctgt

SEQ ID NO: 75 - DNA, 16 bp, Artificial Sequence
  Description of Artificial Sequence: Synthetic oligonucleotide
tgaacacatagggctg

SEQ ID NO: 76 - DNA, 16 bp, Artificial Sequence
  Description of Artificial Sequence: Synthetic oligonucleotide
atgaacacatagggct

SEQ ID NO: 77 - DNA, 16 bp, Artificial Sequence
  Description of Artificial Sequence: Synthetic oligonucleotide
tcttacgaagaagaac

SEQ ID NO: 78 - DNA, 16 bp, Artificial Sequence
  Description of Artificial Sequence: Synthetic oligonucleotide
ttcttacgaagaagaa

SEQ ID NO: 79 - DNA, 16 bp, Artificial Sequence
  Description of Artificial Sequence: Synthetic oligonucleotide
gttcttacgaagaaga

SEQ ID NO: 80 - DNA, 16 bp, Artificial Sequence
  Description of Artificial Sequence: Synthetic oligonucleotide
cgttcttacgaagaag

SEQ ID NO: 81 - DNA, 16 bp, Artificial Sequence
  Description of Artificial Sequence: Synthetic oligonucleotide
ccgttcttacgaagaa

SEQ ID NO: 82 - DNA, 16 bp, Artificial Sequence
  Description of Artificial Sequence: Synthetic oligonucleotide
accgttcttacgaaga

SEQ ID NO: 83 - DNA, 16 bp, Artificial Sequence
  Description of Artificial Sequence: Synthetic oligonucleotide
taccgttcttacgaag

SEQ ID NO: 84 - DNA, 16 bp, Artificial Sequence
  Description of Artificial Sequence: Synthetic oligonucleotide
ttaccgttcttacgaa

SEQ ID NO: 85 - DNA, 16 bp, Artificial Sequence
  Description of Artificial Sequence: Synthetic oligonucleotide
attaccgttcttacga

SEQ ID NO: 86 - DNA, 16 bp, Artificial Sequence
  Description of Artificial Sequence: Synthetic oligonucleotide
tattaccgttcttacg

SEQ ID NO: 87 - DNA, 16 bp, Artificial Sequence
  Description of Artificial Sequence: Synthetic oligonucleotide
ttattaccgttcttac

SEQ ID NO: 88 - DNA, 16 bp, Artificial Sequence
  Description of Artificial Sequence: Synthetic oligonucleotide
cagtgccaagctcgtc

SEQ ID NO: 89 - DNA, 16 bp, Artificial Sequence
  Description of Artificial Sequence: Synthetic oligonucleotide
tcagtgccaagctcgt

SEQ ID NO: 90 - DNA, 16 bp, Artificial Sequence
  Description of Artificial Sequence: Synthetic oligonucleotide
atcagtgccaagctcg

SEQ ID NO: 91 - DNA, 16 bp, Artificial Sequence
  Description of Artificial Sequence: Synthetic oligonucleotide
gatcagtgccaagctc

SEQ ID NO: 92 - DNA, 16 bp, Artificial Sequence
  Description of Artificial Sequence: Synthetic oligonucleotide
ggatcagtgccaagct

SEQ ID NO: 93 - DNA, 16 bp, Artificial Sequence
  Description of Artificial Sequence: Synthetic oligonucleotide
ttagtgttccagtttt

SEQ ID NO: 94 - DNA, 16 bp, Artificial Sequence
  Description of Artificial Sequence: Synthetic oligonucleotide
acacacagcctccaaa

SEQ ID NO: 95 - DNA, 16 bp, Artificial Sequence
  Description of Artificial Sequence: Synthetic oligonucleotide
aacacacagcctccaa

SEQ ID NO: 96 - DNA, 16 bp, Artificial Sequence
  Description of Artificial Sequence: Synthetic oligonucleotide
aagttttaaataacca

SEQ ID NO: 97 - DNA, 16 bp, Artificial Sequence
  Description of Artificial Sequence: Synthetic oligonucleotide
taagttttaaataacc

SEQ ID NO: 98 - DNA, 16 bp, Artificial Sequence
  Description of Artificial Sequence: Synthetic oligonucleotide
gtaagttttaaataac

SEQ ID NO: 99 - DNA, 16 bp, Artificial Sequence
  Description of Artificial Sequence: Synthetic oligonucleotide
agtaagttttaaataa

SEQ ID NO: 100 - DNA, 16 bp, Artificial Sequence
  Description of Artificial Sequence: Synthetic oligonucleotide
cagtaagttttaaata

SEQ ID NO: 101 - DNA, 16 bp, Artificial Sequence
  Description of Artificial Sequence: Synthetic oligonucleotide
tcagtaagttttaaat

SEQ ID NO: 102 - DNA, 16 bp, Artificial Sequence
  Description of Artificial Sequence: Synthetic oligonucleotide
gtcagtaagttttaaa

SEQ ID NO: 103 - DNA, 16 bp, Artificial Sequence
  Description of Artificial Sequence: Synthetic oligonucleotide
tgtcagtaagttttaa

SEQ ID NO: 104 - DNA, 16 bp, Artificial Sequence
  Description of Artificial Sequence: Synthetic oligonucleotide
ttgtcagtaagtttta

SEQ ID NO: 105 - DNA, 16 bp, Artificial Sequence
  Description of Artificial Sequence: Synthetic oligonucleotide
attgtcagtaagtttt

SEQ ID NO: 106 - DNA, 16 bp, Artificial Sequence
  Description of Artificial Sequence: Synthetic oligonucleotide
cattgtcagtaagttt

SEQ ID NO: 107 - DNA, 16 bp, Artificial Sequence
  Description of Artificial Sequence: Synthetic oligonucleotide
acattgtcagtaagtt

SEQ ID NO: 108 - DNA, 16 bp, Artificial Sequence
  Description of Artificial Sequence: Synthetic oligonucleotide
acttagtttcttccag

SEQ ID NO: 109 - DNA, 16 bp, Artificial Sequence
  Description of Artificial Sequence: Synthetic oligonucleotide
aacttagtttcttcca

SEQ ID NO: 110 - DNA, 16 bp, Artificial Sequence
  Description of Artificial Sequence: Synthetic oligonucleotide
cacaaaagttagcagc

SEQ ID NO: 111 - DNA, 16 bp, Artificial Sequence
  Description of Artificial Sequence: Synthetic oligonucleotide
gcacaaaagttagcag

SEQ ID NO: 112 - DNA, 16 bp, Artificial Sequence
  Description of Artificial Sequence: Synthetic oligonucleotide
tgcacaaaagttagca

SEQ ID NO: 113 - DNA, 16 bp, Artificial Sequence
  Description of Artificial Sequence: Synthetic oligonucleotide
gtgcacaaaagttagc

SEQ ID NO: 114 - DNA, 16 bp, Artificial Sequence
  Description of Artificial Sequence: Synthetic oligonucleotide
agtgcacaaaagttag

SEQ ID NO: 115 - DNA, 16 bp, Artificial Sequence
  Description of Artificial Sequence: Synthetic oligonucleotide
gacatcataacaaaag

SEQ ID NO: 116 - DNA, 16 bp, Artificial Sequence
  Description of Artificial Sequence: Synthetic oligonucleotide
ctccaaagacaacgta

SEQ ID NO: 117 - DNA, 16 bp, Artificial Sequence
  Description of Artificial Sequence: Synthetic oligonucleotide
cactacttcttcagag

SEQ ID NO: 118 - DNA, 16 bp, Artificial Sequence
  Description of Artificial Sequence: Synthetic oligonucleotide
ccactacttcttcaga

SEQ ID NO: 119 - DNA, 16 bp, Artificial Sequence
  Description of Artificial Sequence: Synthetic oligonucleotide
tccactacttcttcag

SEQ ID NO: 120 - DNA, 16 bp, Artificial Sequence
  Description of Artificial Sequence: Synthetic oligonucleotide
ttccactacttcttca

SEQ ID NO: 121 - DNA, 16 bp, Artificial Sequence
  Description of Artificial Sequence: Synthetic oligonucleotide
tttccactacttcttc

SEQ ID NO: 122 - DNA, 16 bp, Artificial Sequence
  Description of Artificial Sequence: Synthetic oligonucleotide
ttttccactacttctt

SEQ ID NO: 123 - DNA, 16 bp, Artificial Sequence
  Description of Artificial Sequence: Synthetic oligonucleotide
attttccactacttct

SEQ ID NO: 124 - DNA, 16 bp, Artificial Sequence
  Description of Artificial Sequence: Synthetic oligonucleotide
gattttccactacttc

SEQ ID NO: 125 - DNA, 16 bp, Artificial Sequence
  Description of Artificial Sequence: Synthetic oligonucleotide
ggattttccactactt

SEQ ID NO: 126 - DNA, 16 bp, Artificial Sequence
  Description of Artificial Sequence: Synthetic oligonucleotide
aggattttccactact

SEQ ID NO: 127 - DNA, 16 bp, Artificial Sequence
  Description of Artificial Sequence: Synthetic oligonucleotide
taggattttccactac

SEQ ID NO: 128 - DNA, 16 bp, Artificial Sequence
  Description of Artificial Sequence: Synthetic oligonucleotide
gtaggattttccacta

SEQ ID NO: 129 - DNA, 16 bp, Artificial Sequence
  Description of Artificial Sequence: Synthetic oligonucleotide
ggtaggattttccact

SEQ ID NO: 130 - DNA, 16 bp, Artificial Sequence
  Description of Artificial Sequence: Synthetic oligonucleotide
cttcggtagttttcac

SEQ ID NO: 131 - DNA, 16 bp, Artificial Sequence
  Description of Artificial Sequence: Synthetic oligonucleotide
acttcggtagttttca

SEQ ID NO: 132 - DNA, 16 bp, Artificial Sequence
  Description of Artificial Sequence: Synthetic oligonucleotide
aacttcggtagttttc

SEQ ID NO: 133 - DNA, 16 bp, Artificial Sequence
  Description of Artificial Sequence: Synthetic oligonucleotide
caacttcggtagtttt

SEQ ID NO: 134 - DNA, 16 bp, Artificial Sequence
  Description of Artificial Sequence: Synthetic oligonucleotide
acaacttcggtagttt

SEQ ID NO: 135 - DNA, 16 bp, Artificial Sequence
  Description of Artificial Sequence: Synthetic oligonucleotide
tacaacttcggtagtt

SEQ ID NO: 136 - DNA, 16 bp, Artificial Sequence
  Description of Artificial Sequence: Synthetic oligonucleotide
ctacaacttcggtagt

SEQ ID NO: 137 - DNA, 16 bp, Artificial Sequence
  Description of Artificial Sequence: Synthetic oligonucleotide
cctacaacttcggtag

SEQ ID NO: 138 - DNA, 16 bp, Artificial Sequence
  Description of Artificial Sequence: Synthetic oligonucleotide
cattaggtttcttaat

SEQ ID NO: 139 - DNA, 16 bp, Artificial Sequence
  Description of Artificial Sequence: Synthetic oligonucleotide
tcattaggtttcttaa

SEQ ID NO: 140 - DNA, 16 bp, Artificial Sequence
  Description of Artificial Sequence: Synthetic oligonucleotide
taacaatagttgtaca

SEQ ID NO: 141 - DNA, 16 bp, Artificial Sequence
  Description of Artificial Sequence: Synthetic oligonucleotide
ttaacaatagttgtac

SEQ ID NO: 142 - DNA, 16 bp, Artificial Sequence
  Description of Artificial Sequence: Synthetic oligonucleotide
attaacaatagttgta

SEQ ID NO: 143 - DNA, 16 bp, Artificial Sequence
  Description of Artificial Sequence: Synthetic oligonucleotide
cattaacaatagttgt

SEQ ID NO: 144 - DNA, 16 bp, Artificial Sequence
  Description of Artificial Sequence: Synthetic oligonucleotide
ccattaacaatagttg

SEQ ID NO: 145 - DNA, 16 bp, Artificial Sequence
  Description of Artificial Sequence: Synthetic oligonucleotide
ttggtcttttaaactg

SEQ ID NO: 146 - DNA, 16 bp, Artificial Sequence
  Description of Artificial Sequence: Synthetic oligonucleotide
attggtcttttaaact

SEQ ID NO: 147 - DNA, 16 bp, Artificial Sequence
  Description of Artificial Sequence: Synthetic oligonucleotide
tgtgactttttgctac

SEQ ID NO: 148 - DNA, 16 bp, Artificial Sequence
  Description of Artificial Sequence: Synthetic oligonucleotide
ttgtgactttttgcta

SEQ ID NO: 149 - DNA, 16 bp, Artificial Sequence
  Description of Artificial Sequence: Synthetic oligonucleotide
gtcacgagtgacacca

SEQ ID NO: 150 - DNA, 16 bp, Artificial Sequence
  Description of Artificial Sequence: Synthetic oligonucleotide
tgtcacgagtgacacc

SEQ ID NO: 151 - DNA, 16 bp, Artificial Sequence
  Description of Artificial Sequence: Synthetic oligonucleotide
atgtcacgagtgacac

SEQ ID NO: 152 - DNA, 16 bp, Artificial Sequence
  Description of Artificial Sequence: Synthetic oligonucleotide
gtcaagtacaagtaaa

SEQ ID NO: 153 - DNA, 16 bp, Artificial Sequence
  Description of Artificial Sequence: Synthetic oligonucleotide
tgtcaagtacaagtaa

SEQ ID NO: 154 - DNA, 16 bp, Artificial Sequence
  Description of Artificial Sequence: Synthetic oligonucleotide
atgtcaagtacaagta

SEQ ID NO: 155 - DNA, 16 bp, Artificial Sequence
  Description of Artificial Sequence: Synthetic oligonucleotide
aatgtcaagtacaagt

SEQ ID NO: 156 - DNA, 16 bp, Artificial Sequence
  Description of Artificial Sequence: Synthetic oligonucleotide
ctaaaaccactctgca

SEQ ID NO: 157 - DNA, 16 bp, Artificial Sequence
  Description of Artificial Sequence: Synthetic oligonucleotide
catgtcttggacagta

SEQ ID NO: 158 - DNA, 16 bp, Artificial Sequence
  Description of Artificial Sequence: Synthetic oligonucleotide
acatgtcttggacagt

SEQ ID NO: 159 - DNA, 16 bp, Artificial Sequence
  Description of Artificial Sequence: Synthetic oligonucleotide
atggtgaaccattgta

SEQ ID NO: 160 - DNA, 16 bp, Artificial Sequence
  Description of Artificial Sequence: Synthetic oligonucleotide
gatggtgaaccattgt

SEQ ID NO: 161 - DNA, 16 bp, Artificial Sequence
  Description of Artificial Sequence: Synthetic oligonucleotide
caacactaccacatga

SEQ ID NO: 162 - DNA, 16 bp, Artificial Sequence
  Description of Artificial Sequence: Synthetic oligonucleotide
ccaacactaccacatg

SEQ ID NO: 163 - DNA, 16 bp, Artificial Sequence
  Description of Artificial Sequence: Synthetic oligonucleotide
accaacactaccacat

SEQ ID NO: 164 - DNA, 16 bp, Artificial Sequence
  Description of Artificial Sequence: Synthetic oligonucleotide
aaccaacactaccaca

SEQ ID NO: 165 - DNA, 16 bp, Artificial Sequence
  Description of Artificial Sequence: Synthetic oligonucleotide
aaaccaacactaccac

SEQ ID NO: 166 - DNA, 16 bp, Artificial Sequence
  Description of Artificial Sequence: Synthetic oligonucleotide
aaaaccaacactacca

SEQ ID NO: 167 - DNA, 16 bp, Artificial Sequence
  Description of Artificial Sequence: Synthetic oligonucleotide
taaaaccaacactacc

SEQ ID NO: 168 - DNA, 16 bp, Artificial Sequence
  Description of Artificial Sequence: Synthetic oligonucleotide
ttaaaaccaacactac

SEQ ID NO: 169 - DNA, 16 bp, Artificial Sequence
  Description of Artificial Sequence: Synthetic oligonucleotide
gttaaaaccaacacta

SEQ ID NO: 170 - DNA, 16 bp, Artificial Sequence
  Description of Artificial Sequence: Synthetic oligonucleotide
tgttaaaaccaacact

SEQ ID NO: 171 - DNA, 16 bp, Artificial Sequence
  Description of Artificial Sequence: Synthetic oligonucleotide
atgttaaaaccaacac

SEQ ID NO: 172 - DNA, 16 bp, Artificial Sequence
  Description of Artificial Sequence: Synthetic oligonucleotide
gcaagagaaggtaaca

SEQ ID NO: 173 - DNA, 16 bp, Artificial Sequence
  Description of Artificial Sequence: Synthetic oligonucleotide
ctaagaaacaataaac

SEQ ID NO: 174 - DNA, 16 bp, Artificial Sequence
  Description of Artificial Sequence: Synthetic oligonucleotide
cctaagaaacaataaa

SEQ ID NO: 175 - DNA, 16 bp, Artificial Sequence
  Description of Artificial Sequence: Synthetic oligonucleotide
gcctaagaaacaataa

SEQ ID NO: 176 - DNA, 16 bp, Artificial Sequence
  Description of Artificial Sequence: Synthetic oligonucleotide
agcctaagaaacaata

SEQ ID NO: 177 - DNA, 16 bp, Artificial Sequence
  Description of Artificial Sequence: Synthetic oligonucleotide
tagcctaagaaacaat

SEQ ID NO: 178 - DNA, 16 bp, Artificial Sequence
  Description of Artificial Sequence: Synthetic oligonucleotide
atagcctaagaaacaa

SEQ ID NO: 179 - DNA, 16 bp, Artificial Sequence
  Description of Artificial Sequence: Synthetic oligonucleotide
aatagcctaagaaaca

SEQ ID NO: 180 - DNA, 16 bp, Artificial Sequence
  Description of Artificial Sequence: Synthetic oligonucleotide
cataaacaccaagagt

SEQ ID NO: 181 - DNA, 16 bp, Artificial Sequence
  Description of Artificial Sequence: Synthetic oligonucleotide
tcataaacaccaagag

SEQ ID NO: 182 - DNA, 16 bp, Artificial Sequence
  Description of Artificial Sequence: Synthetic oligonucleotide
ttttagactgtacagt

SEQ ID NO: 183 - DNA, 16 bp, Artificial Sequence
  Description of Artificial Sequence: Synthetic oligonucleotide
attttagactgtacag

SEQ ID NO: 184 - DNA, 16 bp, Artificial Sequence
  Description of Artificial Sequence: Synthetic oligonucleotide
cattttagactgtaca

SEQ ID NO: 185 - DNA, 16 bp, Artificial Sequence
  Description of Artificial Sequence: Synthetic oligonucleotide
acattttagactgtac

SEQ ID NO: 186 - DNA, 16 bp, Artificial Sequence
  Description of Artificial Sequence: Synthetic oligonucleotide
gacattttagactgta

SEQ ID NO: 187 - DNA, 16 bp, Artificial Sequence
  Description of Artificial Sequence: Synthetic oligonucleotide
cagcaccctgcatgga

SEQ ID NO: 188 - DNA, 16 bp, Artificial Sequence
  Description of Artificial Sequence: Synthetic oligonucleotide
acagcaccctgcatgg

SEQ ID NO: 189 - DNA, 16 bp, Artificial Sequence
  Description of Artificial Sequence: Synthetic oligonucleotide
tacagcaccctgcatg

SEQ ID NO: 190 - DNA, 16 bp, Artificial Sequence
  Description of Artificial Sequence: Synthetic oligonucleotide
ctacagcaccctgcat

SEQ ID NO: 191 - DNA, 16 bp, Artificial Sequence
  Description of Artificial Sequence: Synthetic oligonucleotide
tctacagcaccctgca

SEQ ID NO: 192 - DNA, 16 bp, Artificial Sequence
  Description of Artificial Sequence: Synthetic oligonucleotide
gtctacagcaccctgc

SEQ ID NO: 193 - DNA, 16 bp, Artificial Sequence
  Description of Artificial Sequence: Synthetic oligonucleotide
tgtctacagcaccctg

SEQ ID NO: 194 - DNA, 16 bp, Artificial Sequence
  Description of Artificial Sequence: Synthetic oligonucleotide
atgtctacagcaccct

SEQ ID NO: 195 - DNA, 16 bp, Artificial Sequence
  Description of Artificial Sequence: Synthetic oligonucleotide
cttcagaatcaccatt

SEQ ID NO: 196 - DNA, 16 bp, Artificial Sequence
  Description of Artificial Sequence: Synthetic oligonucleotide
acttcagaatcaccat

SEQ ID NO: 197 - DNA, 16 bp, Artificial Sequence
  Description of Artificial Sequence: Synthetic oligonucleotide
tagccacattcaaaga

SEQ ID NO: 198 - DNA, 16 bp, Artificial Sequence
  Description of Artificial Sequence: Synthetic oligonucleotide
ttagccacattcaaag

SEQ ID NO: 199 - DNA, 16 bp, Artificial Sequence
  Description of Artificial Sequence: Synthetic oligonucleotide
tttagccacattcaaa

SEQ ID NO: 200 - DNA, 16 bp, Artificial Sequence
  Description of Artificial Sequence: Synthetic oligonucleotide
atttagccacattcaa

SEQ ID NO: 201 - DNA, 16 bp, Artificial Sequence
  Description of Artificial Sequence: Synthetic oligonucleotide
gatttagccacattca

SEQ ID NO: 202 - DNA, 16 bp, Artificial Sequence
  Description of Artificial Sequence: Synthetic oligonucleotide
agatttagccacattc

SEQ ID NO: 203 - DNA, 16 bp, Artificial Sequence
  Description of Artificial Sequence: Synthetic oligonucleotide
cagatttagccacatt

SEQ ID NO: 204 - DNA, 16 bp, Artificial Sequence
  Description of Artificial Sequence: Synthetic oligonucleotide
tcagatttagccacat

SEQ ID NO: 205 - DNA, 16 bp, Artificial Sequence
  Description of Artificial Sequence: Synthetic oligonucleotide
ccatcttttccaactt

SEQ ID NO: 206 - DNA, 16 bp, Artificial Sequence
  Description of Artificial Sequence: Synthetic oligonucleotide
gccatcttttccaact

SEQ ID NO: 207 - DNA, 16 bp, Artificial Sequence
  Description of Artificial Sequence: Synthetic oligonucleotide
acatttgggtcatagc

SEQ ID NO: 208 - DNA, 16 bp, Artificial Sequence
  Description of Artificial Sequence: Synthetic oligonucleotide
tacatttgggtcatag

SEQ ID NO: 209 - DNA, 16 bp, Artificial Sequence
  Description of Artificial Sequence: Synthetic oligonucleotide
cttttgccctcttgtc

SEQ ID NO: 210 - DNA, 16 bp, Artificial Sequence
  Description of Artificial Sequence: Synthetic oligonucleotide
acttttgccctcttgt

SEQ ID NO: 211 - DNA, 16 bp, Artificial Sequence
  Description of Artificial Sequence: Synthetic oligonucleotide
tgttgataatgttgtt

SEQ ID NO: 212 - DNA, 16 bp, Artificial Sequence
  Description of Artificial Sequence: Synthetic oligonucleotide
ttgttgataatgttgt

SEQ ID NO: 213 - DNA, 16 bp, Artificial Sequence
  Description of Artificial Sequence: Synthetic oligonucleotide
attgttgataatgttg

SEQ ID NO: 214 - DNA, 16 bp, Artificial Sequence
  Description of Artificial Sequence: Synthetic oligonucleotide
cattgttgataatgtt

SEQ ID NO: 215 - DNA, 16 bp, Artificial Sequence
  Description of Artificial Sequence: Synthetic oligonucleotide
gcattgttgataatgt

SEQ ID NO: 216 - DNA, 16 bp, Artificial Sequence
  Description of Artificial Sequence: Synthetic oligonucleotide
acatctgtcgtagtgc

SEQ ID NO: 217 - DNA, 16 bp, Artificial Sequence
  Description of Artificial Sequence: Synthetic oligonucleotide
gacatctgtcgtagtg

SEQ ID NO: 218 - DNA, 16 bp, Artificial Sequence
  Description of Artificial Sequence: Synthetic oligonucleotide
caaacctacctccctt

SEQ ID NO: 219 - DNA, 16 bp, Artificial Sequence
  Description of Artificial Sequence: Synthetic oligonucleotide
acaaacctacctccct

SEQ ID NO: 220 - DNA, 16 bp, Artificial Sequence
  Description of Artificial Sequence: Synthetic oligonucleotide
ggaatctagcccattt

SEQ ID NO: 221 - DNA, 16 bp, Artificial Sequence
  Description of Artificial Sequence: Synthetic oligonucleotide
gggaatctagcccatt

SEQ ID NO: 222 - DNA, 16 bp, Artificial Sequence
  Description of Artificial Sequence: Synthetic oligonucleotide
agggaatctagcccat

SEQ ID NO: 223 - DNA, 16 bp, Artificial Sequence
  Description of Artificial Sequence: Synthetic oligonucleotide
tagggaatctagccca

SEQ ID NO: 224 - DNA, 16 bp, Artificial Sequence
  Description of Artificial Sequence: Synthetic oligonucleotide
ttagggaatctagccc

SEQ ID NO: 225 - DNA, 16 bp, Artificial Sequence
  Description of Artificial Sequence: Synthetic oligonucleotide
cttagggaatctagcc

SEQ ID NO: 226 - DNA, 16 bp, Artificial Sequence
  Description of Artificial Sequence: Synthetic oligonucleotide
tcttagggaatctagc

SEQ ID NO: 227 - DNA, 16 bp, Artificial Sequence
  Description of Artificial Sequence: Synthetic oligonucleotide
ctcttagggaatctag

SEQ ID NO: 228 - DNA, 16 bp, Artificial Sequence
  Description of Artificial Sequence: Synthetic oligonucleotide
actcttagggaatcta

SEQ ID NO: 229 - DNA, 16 bp, Artificial Sequence
  Description of Artificial Sequence: Synthetic oligonucleotide
cactcttagggaatct

SEQ ID NO: 230 - DNA, 16 bp, Artificial Sequence
  Description of Artificial Sequence: Synthetic oligonucleotide
tcactcttagggaatc

SEQ ID NO: 231 - DNA, 16 bp, Artificial Sequence
  Description of Artificial Sequence: Synthetic oligonucleotide
atcactcttagggaat

SEQ ID NO: 232 - DNA, 16 bp, Artificial Sequence
  Description of Artificial Sequence: Synthetic oligonucleotide
catcactcttagggaa

SEQ ID NO: 233 - DNA, 16 bp, Artificial Sequence
  Description of Artificial Sequence: Synthetic oligonucleotide
ccatcactcttaggga

SEQ ID NO: 234 - DNA, 16 bp, Artificial Sequence
  Description of Artificial Sequence: Synthetic oligonucleotide
ggtggttccagttctg

SEQ ID NO: 235 - DNA, 16 bp, Artificial Sequence
  Description of Artificial Sequence: Synthetic oligonucleotide
aggtggttccagttct

SEQ ID NO: 236 - DNA, 16 bp, Artificial Sequence
  Description of Artificial Sequence: Synthetic oligonucleotide
aaggtggttccagttc

SEQ ID NO: 237 - DNA, 16 bp, Artificial Sequence
  Description of Artificial Sequence: Synthetic oligonucleotide
caaggtggttccagtt

SEQ ID NO: 238 - DNA, 16 bp, Artificial Sequence
  Description of Artificial Sequence: Synthetic oligonucleotide
acaaggtggttccagt

SEQ ID NO: 239 - DNA, 16 bp, Artificial Sequence
  Description of Artificial Sequence: Synthetic oligonucleotide
tacaaggtggttccag

SEQ ID NO: 240 - DNA, 16 bp, Artificial Sequence
  Description of Artificial Sequence: Synthetic oligonucleotide
ctacaaggtggttcca

SEQ ID NO: 241 - DNA, 16 bp, Artificial Sequence
  Description of Artificial Sequence: Synthetic oligonucleotide
cctacaaggtggttcc

SEQ ID NO: 242 - DNA, 16 bp, Artificial Sequence
  Description of Artificial Sequence: Synthetic oligonucleotide
acctacaaggtggttc

SEQ ID NO: 243 - DNA, 16 bp, Artificial Sequence
  Description of Artificial Sequence: Synthetic oligonucleotide
aacctacaaggtggtt

SEQ ID NO: 244 - DNA, 16 bp, Artificial Sequence
  Description of Artificial Sequence: Synthetic oligonucleotide
aaacctacaaggtggt

SEQ ID NO: 245 - DNA, 16 bp, Artificial Sequence
  Description of Artificial Sequence: Synthetic oligonucleotide
caaacctacaaggtgg

SEQ ID NO: 246 - DNA, 16 bp, Artificial Sequence
  Description of Artificial Sequence: Synthetic oligonucleotide
acaaacctacaaggtg

SEQ ID NO: 247 - DNA, 16 bp, Artificial Sequence
  Description of Artificial Sequence: Synthetic oligonucleotide
aacaaacctacaaggt

SEQ ID NO: 248 - DNA, 16 bp, Artificial Sequence
  Description of Artificial Sequence: Synthetic oligonucleotide
taacaaacctacaagg

SEQ ID NO: 249 - DNA, 16 bp, Artificial Sequence
  Description of Artificial Sequence: Synthetic oligonucleotide
gtaacaaacctacaag

SEQ ID NO: 250 - DNA, 16 bp, Artificial Sequence
  Description of Artificial Sequence: Synthetic oligonucleotide
tgtaacaaacctacaa

SEQ ID NO: 251 - DNA, 16 bp, Artificial Sequence
  Description of Artificial Sequence: Synthetic oligonucleotide
ctgtaacaaacctaca

SEQ ID NO: 252 - DNA, 16 bp, Artificial Sequence
  Description of Artificial Sequence: Synthetic oligonucleotide
tctgtaacaaacctac

SEQ ID NO: 253 - DNA, 16 bp, Artificial Sequence
  Description of Artificial Sequence: Synthetic oligonucleotide
gtctgtaacaaaccta

SEQ ID NO: 254 - DNA, 16 bp, Artificial Sequence
  Description of Artificial Sequence: Synthetic oligonucleotide
tgtctgtaacaaacct

SEQ ID NO: 255 - DNA, 16 bp, Artificial Sequence
  Description of Artificial Sequence: Synthetic oligonucleotide
gtgtctgtaacaaacc

SEQ ID NO: 256 - DNA, 16 bp, Artificial Sequence
  Description of Artificial Sequence: Synthetic oligonucleotide
tgtgtctgtaacaaac

SEQ ID NO: 257 - DNA, 16 bp, Artificial Sequence
  Description of Artificial Sequence: Synthetic oligonucleotide
gtgtgtctgtaacaaa

SEQ ID NO: 258 - DNA, 16 bp, Artificial Sequence
  Description of Artificial Sequence: Synthetic oligonucleotide
ggtgtgtctgtaacaa

SEQ ID NO: 259 - DNA, 16 bp, Artificial Sequence
  Description of Artificial Sequence: Synthetic oligonucleotide
ctatttaggttgttta

SEQ ID NO: 260 - DNA, 16 bp, Artificial Sequence
  Description of Artificial Sequence: Synthetic oligonucleotide
tctatttaggttgttt

SEQ ID NO: 261 - DNA, 16 bp, Artificial Sequence
  Description of Artificial Sequence: Synthetic oligonucleotide
ctctatttaggttgtt

SEQ ID NO: 262 - DNA, 16 bp, Artificial Sequence
  Description of Artificial Sequence: Synthetic oligonucleotide
cctctatttaggttgt

SEQ ID NO: 263 - DNA, 16 bp, Artificial Sequence
  Description of Artificial Sequence: Synthetic oligonucleotide
acctctatttaggttg

SEQ ID NO: 264 - DNA, 16 bp, Artificial Sequence
  Description of Artificial Sequence: Synthetic oligonucleotide
tacctctatttaggtt

SEQ ID NO: 265 - DNA, 16 bp, Artificial Sequence
  Description of Artificial Sequence: Synthetic oligonucleotide
atacctctatttaggt

SEQ ID NO: 266 - DNA, 16 bp, Artificial Sequence
  Description of Artificial Sequence: Synthetic oligonucleotide
catacctctatttagg

SEQ ID NO: 267 - DNA, 16 bp, Artificial Sequence
  Description of Artificial Sequence: Synthetic oligonucleotide
ccatacctctatttag

SEQ ID NO: 268 - DNA, 16 bp, Artificial Sequence
  Description of Artificial Sequence: Synthetic oligonucleotide
accatacctctattta

SEQ ID NO: 269 - DNA, 16 bp, Artificial Sequence
  Description of Artificial Sequence: Synthetic oligonucleotide
cagttgaattggcagg

SEQ ID NO: 270 - DNA, 16 bp, Artificial Sequence
  Description of Artificial Sequence: Synthetic oligonucleotide
acagttgaattggcag

SEQ ID NO: 271 - DNA, 16 bp, Artificial Sequence
  Description of Artificial Sequence: Synthetic oligonucleotide
gtgtacacaacatctt

SEQ ID NO: 272 - DNA, 16 bp, Artificial Sequence
  Description of Artificial Sequence: Synthetic oligonucleotide
tgtgtacacaacatct

SEQ ID NO: 273 - DNA, 16 bp, Artificial Sequence
  Description of Artificial Sequence: Synthetic oligonucleotide
gtgtgtacacaacatc

SEQ ID NO: 274 - DNA, 16 bp, Artificial Sequence
  Description of Artificial Sequence: Synthetic oligonucleotide
tgtgtgtacacaacat

SEQ ID NO: 275 - DNA, 16 bp, Artificial Sequence
  Description of Artificial Sequence: Synthetic oligonucleotide
gtgtgtgtacacaaca

SEQ ID NO: 276 - DNA, 16 bp, Artificial Sequence
  Description of Artificial Sequence: Synthetic oligonucleotide
agtgtgtgtacacaac

SEQ ID NO: 277 - DNA, 16 bp, Artificial Sequence
  Description of Artificial Sequence: Synthetic oligonucleotide
cagtgtgtgtacacaa

SEQ ID NO: 278 - DNA, 16 bp, Artificial Sequence
  Description of Artificial Sequence: Synthetic oligonucleotide
ccagtgtgtgtacaca

SEQ ID NO: 279 - DNA, 16 bp, Artificial Sequence
  Description of Artificial Sequence: Synthetic oligonucleotide
accagtgtgtgtacac

SEQ ID NO: 280 - DNA, 16 bp, Artificial Sequence
  Description of Artificial Sequence: Synthetic oligonucleotide
taccagtgtgtgtaca

SEQ ID NO: 281 - DNA, 16 bp, Artificial Sequence
  Description of Artificial Sequence: Synthetic oligonucleotide
gtaccagtgtgtgtac

SEQ ID NO: 282 - DNA, 16 bp, Artificial Sequence
  Description of Artificial Sequence: Synthetic oligonucleotide
ggtcattagcacaagt

SEQ ID NO: 283 - DNA, 16 bp, Artificial Sequence
  Description of Artificial Sequence: Synthetic oligonucleotide
gggtcattagcacaag

SEQ ID NO: 284 - DNA, 16 bp, Artificial Sequence
  Description of Artificial Sequence: Synthetic oligonucleotide
taagtgtaaaacccac

SEQ ID NO: 285 - DNA, 16 bp, Artificial Sequence
  Description of Artificial Sequence: Synthetic oligonucleotide
ggtacagactgtgttt

SEQ ID NO: 286 - DNA, 16 bp, Artificial Sequence
  Description of Artificial Sequence: Synthetic oligonucleotide
cggtacagactgtgtt

SEQ ID NO: 287 - DNA, 16 bp, Artificial Sequence
  Description of Artificial Sequence: Synthetic oligonucleotide
acggtacagactgtgt

SEQ ID NO: 288 - DNA, 16 bp, Artificial Sequence
  Description of Artificial Sequence: Synthetic oligonucleotide
gacggtacagactgtg

SEQ ID NO: 289 - DNA, 16 bp, Artificial Sequence
  Description of Artificial Sequence: Synthetic oligonucleotide
agacggtacagactgt

SEQ ID NO: 290 - DNA, 16 bp, Artificial Sequence
  Description of Artificial Sequence: Synthetic oligonucleotide
cagacggtacagactg

SEQ ID NO: 291 - DNA, 16 bp, Artificial Sequence
  Description of Artificial Sequence: Synthetic oligonucleotide
gcagacggtacagact

SEQ ID NO: 292 - DNA, 16 bp, Artificial Sequence
  Description of Artificial Sequence: Synthetic oligonucleotide
cgcagacggtacagac

SEQ ID NO: 293 - DNA, 16 bp, Artificial Sequence
  Description of Artificial Sequence: Synthetic oligonucleotide
ccgcagacggtacaga

SEQ ID NO: 294 - DNA, 16 bp, Artificial Sequence
  Description of Artificial Sequence: Synthetic oligonucleotide
cataacctttccacat

SEQ ID NO: 295 - DNA, 16 bp, Artificial Sequence
  Description of Artificial Sequence: Synthetic oligonucleotide
ccataacctttccaca

SEQ ID NO: 296 - DNA, 16 bp, Artificial Sequence
  Description of Artificial Sequence: Synthetic oligonucleotide
gccataacctttccac

SEQ ID NO: 297 - DNA, 16 bp, Artificial Sequence
  Description of Artificial Sequence: Synthetic oligonucleotide
agccataacctttcca

SEQ ID NO: 298 - DNA, 16 bp, Artificial Sequence
  Description of Artificial Sequence: Synthetic oligonucleotide
cagccataacctttcc

SEQ ID NO: 299 - DNA, 16 bp, Artificial Sequence
  Description of Artificial Sequence: Synthetic oligonucleotide
acagccataacctttc

SEQ ID NO: 300 - DNA, 16 bp, Artificial Sequence
  Description of Artificial Sequence: Synthetic oligonucleotide
tacagccataaccttt

SEQ ID NO: 301 - DNA, 16 bp, Artificial Sequence
  Description of Artificial Sequence: Synthetic oligonucleotide
ctacagccataacctt

SEQ ID NO: 302 - DNA, 16 bp, Artificial Sequence
  Description of Artificial Sequence: Synthetic oligonucleotide
actacagccataacct

SEQ ID NO: 303 - DNA, 16 bp, Artificial Sequence
  Description of Artificial Sequence: Synthetic oligonucleotide
aactacagccataacc

SEQ ID NO: 304 - DNA, 16 bp, Artificial Sequence
  Description of Artificial Sequence: Synthetic oligonucleotide
caactacagccataac

SEQ ID NO: 305 - DNA, 16 bp, Artificial Sequence
  Description of Artificial Sequence: Synthetic oligonucleotide
acaactacagccataa

SEQ ID NO: 306 - DNA, 16 bp, Artificial Sequence
  Description of Artificial Sequence: Synthetic oligonucleotide
cacaactacagccata

SEQ ID NO: 307 - DNA, 16 bp, Artificial Sequence
  Description of Artificial Sequence: Synthetic oligonucleotide
tcacaactacagccat

SEQ ID NO: 308 - DNA, 16 bp, Artificial Sequence
  Description of Artificial Sequence: Synthetic oligonucleotide
aacccgtttaaaaacg

SEQ ID NO: 309 - DNA, 16 bp, Artificial Sequence
  Description of Artificial Sequence: Synthetic oligonucleotide
aaacccgtttaaaaac

SEQ ID NO: 310 - DNA, 16 bp, Artificial Sequence
  Description of Artificial Sequence: Synthetic oligonucleotide
caaacccgtttaaaaa

SEQ ID NO: 311 - DNA, 16 bp, Artificial Sequence
  Description of Artificial Sequence: Synthetic oligonucleotide
gcaaacccgtttaaaa

SEQ ID NO: 312 - DNA, 16 bp, Artificial Sequence
  Description of Artificial Sequence: Synthetic oligonucleotide
cgcaaacccgtttaaa

SEQ ID NO: 313 - DNA, 16 bp, Artificial Sequence
  Description of Artificial Sequence: Synthetic oligonucleotide
ccgcaaacccgtttaa

SEQ ID NO: 314 - DNA, 16 bp, Artificial Sequence
  Description of Artificial Sequence: Synthetic oligonucleotide
accgcaaacccgttta

SEQ ID NO: 315 - DNA, 16 bp, Artificial Sequence
  Description of Artificial Sequence: Synthetic oligonucleotide
caccgcaaacccgttt

SEQ ID NO: 316 - DNA, 16 bp, Artificial Sequence
  Description of Artificial Sequence: Synthetic oligonucleotide
acaccgcaaacccgtt

SEQ ID NO: 317 - DNA, 16 bp, Artificial Sequence
  Description of Artificial Sequence: Synthetic oligonucleotide
tacaccgcaaacccgt

SEQ ID NO: 318 - DNA, 16 bp, Artificial Sequence
  Description of Artificial Sequence: Synthetic oligonucleotide
ttacaccgcaaacccg

SEQ ID NO: 319 - DNA, 16 bp, Artificial Sequence
  Description of Artificial Sequence: Synthetic oligonucleotide
cttacaccgcaaaccc

SEQ ID NO: 320 - DNA, 16 bp, Artificial Sequence
  Description of Artificial Sequence: Synthetic oligonucleotide
acttacaccgcaaacc

SEQ ID NO: 321 - DNA, 16 bp, Artificial Sequence
  Description of Artificial Sequence: Synthetic oligonucleotide
cacttacaccgcaaac

SEQ ID NO: 322 - DNA, 16 bp, Artificial Sequence
  Description of Artificial Sequence: Synthetic oligonucleotide
gcacttacaccgcaaa

SEQ ID NO: 323 - DNA, 16 bp, Artificial Sequence
  Description of Artificial Sequence: Synthetic oligonucleotide
tgcacttacaccgcaa

SEQ ID NO: 324 - DNA, 16 bp, Artificial Sequence
  Description of Artificial Sequence: Synthetic oligonucleotide
ctgcacttacaccgca

SEQ ID NO: 325 - DNA, 16 bp, Artificial Sequence
  Description of Artificial Sequence: Synthetic oligonucleotide
gctgcacttacaccgc

SEQ ID NO: 326 - DNA, 16 bp, Artificial Sequence
  Description of Artificial Sequence: Synthetic oligonucleotide
ggctgcacttacaccg

SEQ ID NO: 327 - DNA, 16 bp, Artificial Sequence
  Description of Artificial Sequence: Synthetic oligonucleotide
gggctgcacttacacc

SEQ ID NO: 328 - DNA, 16 bp, Artificial Sequence
  Description of Artificial Sequence: Synthetic oligonucleotide
cgggctgcacttacac

SEQ ID NO: 329 - DNA, 16 bp, Artificial Sequence
  Description of Artificial Sequence: Synthetic oligonucleotide
acgggctgcacttaca

SEQ ID NO: 330 - DNA, 16 bp, Artificial Sequence
  Description of Artificial Sequence: Synthetic oligonucleotide
gacgggctgcacttac

SEQ ID NO: 331 - DNA, 16 bp, Artificial Sequence
  Description of Artificial Sequence: Synthetic oligonucleotide
agacgggctgcactta

SEQ ID NO: 332 - DNA, 16 bp, Artificial Sequence
  Description of Artificial Sequence: Synthetic oligonucleotide
aagacgggctgcactt

SEQ ID NO: 333 - DNA, 16 bp, Artificial Sequence
  Description of Artificial Sequence: Synthetic oligonucleotide
taagacgggctgcact

SEQ ID NO: 334 - DNA, 16 bp, Artificial Sequence
  Description of Artificial Sequence: Synthetic oligonucleotide
gtaagacgggctgcac

SEQ ID NO: 335 - DNA, 16 bp, Artificial Sequence
  Description of Artificial Sequence: Synthetic oligonucleotide
tgtaagacgggctgca

SEQ ID NO: 336 - DNA, 16 bp, Artificial Sequence
  Description of Artificial Sequence: Synthetic oligonucleotide
gtgtaagacgggctgc

SEQ ID NO: 337 - DNA, 16 bp, Artificial Sequence
  Description of Artificial Sequence: Synthetic oligonucleotide
ggtgtaagacgggctg

SEQ ID NO: 338 - DNA, 16 bp, Artificial Sequence
  Description of Artificial Sequence: Synthetic oligonucleotide
cggtgtaagacgggct

SEQ ID NO: 339 - DNA, 16 bp, Artificial Sequence
  Description of Artificial Sequence: Synthetic oligonucleotide
acggtgtaagacgggc

SEQ ID NO: 340 - DNA, 16 bp, Artificial Sequence
  Description of Artificial Sequence: Synthetic oligonucleotide
cacggtgtaagacggg

SEQ ID NO: 341 - DNA, 16 bp, Artificial Sequence
  Description of Artificial Sequence: Synthetic oligonucleotide
gcacggtgtaagacgg

SEQ ID NO: 342 - DNA, 16 bp, Artificial Sequence
  Description of Artificial Sequence: Synthetic oligonucleotide
cgcacggtgtaagacg

SEQ ID NO: 343 - DNA, 16 bp, Artificial Sequence
  Description of Artificial Sequence: Synthetic oligonucleotide
ccgcacggtgtaagac

SEQ ID NO: 344 - DNA, 16 bp, Artificial Sequence
  Description of Artificial Sequence: Synthetic oligonucleotide
gccgcacggtgtaaga

SEQ ID NO: 345 - DNA, 16 bp, Artificial Sequence
  Description of Artificial Sequence: Synthetic oligonucleotide
tgccgcacggtgtaag

SEQ ID NO: 346 - DNA, 16 bp, Artificial Sequence
  Description of Artificial Sequence: Synthetic oligonucleotide
gtgccgcacggtgtaa

SEQ ID NO: 347 - DNA, 16 bp, Artificial Sequence
  Description of Artificial Sequence: Synthetic oligonucleotide
tgtgccgcacggtgta

SEQ ID NO: 348 - DNA, 16 bp, Artificial Sequence
  Description of Artificial Sequence: Synthetic oligonucleotide
ctgtgccgcacggtgt

SEQ ID NO: 349 - DNA, 16 bp, Artificial Sequence
  Description of Artificial Sequence: Synthetic oligonucleotide
cctgtgccgcacggtg

SEQ ID NO: 350 - DNA, 16 bp, Artificial Sequence
  Description of Artificial Sequence: Synthetic oligonucleotide
gcctgtgccgcacggt

SEQ ID NO: 351 - DNA, 16 bp, Artificial Sequence
  Description of Artificial Sequence: Synthetic oligonucleotide
tgcctgtgccgcacgg

SEQ ID NO: 352 - DNA, 16 bp, Artificial Sequence
  Description of Artificial Sequence: Synthetic oligonucleotide
gtgcctgtgccgcacg

SEQ ID NO: 353 - DNA, 16 bp, Artificial Sequence
  Description of Artificial Sequence: Synthetic oligonucleotide
agtgcctgtgccgcac

SEQ ID NO: 354 - DNA, 16 bp, Artificial Sequence
  Description of Artificial Sequence: Synthetic oligonucleotide
tagtgcctgtgccgca

SEQ ID NO: 355 - DNA, 16 bp, Artificial Sequence
  Description of Artificial Sequence: Synthetic oligonucleotide
ctagtgcctgtgccgc

SEQ ID NO: 356 - DNA, 16 bp, Artificial Sequence
  Description of Artificial Sequence: Synthetic oligonucleotide
aattagtttttaggaa

SEQ ID NO: 357 - DNA, 16 bp, Artificial Sequence
  Description of Artificial Sequence: Synthetic oligonucleotide
caattagtttttagga

SEQ ID NO: 358 - DNA, 16 bp, Artificial Sequence
  Description of Artificial Sequence: Synthetic oligonucleotide
cttcatgttggtagtt

SEQ ID NO: 359 - DNA, 16 bp, Artificial Sequence
  Description of Artificial Sequence: Synthetic oligonucleotide
tcttcatgttggtagt

SEQ ID NO: 360 - DNA, 16 bp, Artificial Sequence
  Description of Artificial Sequence: Synthetic oligonucleotide
gtggtaccatgtcacc

SEQ ID NO: 361 - DNA, 16 bp, Artificial Sequence
  Description of Artificial Sequence: Synthetic oligonucleotide
tgtggtaccatgtcac

SEQ ID NO: 362 - DNA, 16 bp, Artificial Sequence
  Description of Artificial Sequence: Synthetic oligonucleotide
atgtggtaccatgtca

SEQ ID NO: 363 - DNA, 16 bp, Artificial Sequence
  Description of Artificial Sequence: Synthetic oligonucleotide
tatgtggtaccatgtc

SEQ ID NO: 364 - DNA, 16 bp, Artificial Sequence
  Description of Artificial Sequence: Synthetic oligonucleotide
atatgtggtaccatgt

SEQ ID NO: 365 - DNA, 16 bp, Artificial Sequence
  Description of Artificial Sequence: Synthetic oligonucleotide
tatatgtggtaccatg

SEQ ID NO: 366 - DNA, 16 bp, Artificial Sequence
  Description of Artificial Sequence: Synthetic oligonucleotide
atatatgtggtaccat

SEQ ID NO: 367 - DNA, 16 bp, Artificial Sequence
  Description of Artificial Sequence: Synthetic oligonucleotide
gatatatgtggtacca

SEQ ID NO: 368 - DNA, 16 bp, Artificial Sequence
  Description of Artificial Sequence: Synthetic oligonucleotide
tgatatatgtggtacc

SEQ ID NO: 369 - DNA, 16 bp, Artificial Sequence
  Description of Artificial Sequence: Synthetic oligonucleotide
gtgatatatgtggtac

SEQ ID NO: 370 - DNA, 16 bp, Artificial Sequence
  Description of Artificial Sequence: Synthetic oligonucleotide
cgtgatatatgtggta

SEQ ID NO: 371 - DNA, 16 bp, Artificial Sequence
  Description of Artificial Sequence: Synthetic oligonucleotide
acgtgatatatgtggt

SEQ ID NO: 372 - DNA, 16 bp, Artificial Sequence
  Description of Artificial Sequence: Synthetic oligonucleotide
gacgtgatatatgtgg

SEQ ID NO: 373 - DNA, 16 bp, Artificial Sequence
  Description of Artificial Sequence: Synthetic oligonucleotide
tgacgtgatatatgtg

SEQ ID NO: 374 - DNA, 16 bp, Artificial Sequence
  Description of Artificial Sequence: Synthetic oligonucleotide
ccattgtgtatttagt

SEQ ID NO: 375 - DNA, 16 bp, Artificial Sequence
  Description of Artificial Sequence: Synthetic oligonucleotide
gccattgtgtatttag

SEQ ID NO: 376 - DNA, 16 bp, Artificial Sequence
  Description of Artificial Sequence: Synthetic oligonucleotide
atttaaaataacggtc

SEQ ID NO: 377 - DNA, 16 bp, Artificial Sequence
  Description of Artificial Sequence: Synthetic oligonucleotide
tatttaaaataacggt

SEQ ID NO: 378 - DNA, 16 bp, Artificial Sequence
  Description of Artificial Sequence: Synthetic oligonucleotide
atatttaaaataacgg

SEQ ID NO: 379 - DNA, 16 bp, Artificial Sequence
  Description of Artificial Sequence: Synthetic oligonucleotide
aatatttaaaataacg

SEQ ID NO: 380 - DNA, 16 bp, Artificial Sequence
  Description of Artificial Sequence: Synthetic oligonucleotide
caatatttaaaataac

SEQ ID NO: 381 - DNA, 16 bp, Artificial Sequence
  Description of Artificial Sequence: Synthetic oligonucleotide
ccaatatttaaaataa

SEQ ID NO: 382 - DNA, 16 bp, Artificial Sequence
  Description of Artificial Sequence: Synthetic oligonucleotide
cccaatatttaaaata

SEQ ID NO: 383 - DNA, 16 bp, Artificial Sequence
  Description of Artificial Sequence: Synthetic oligonucleotide
tcccaatatttaaaat

SEQ ID NO: 384 - DNA, 16 bp, Artificial Sequence
  Description of Artificial Sequence: Synthetic oligonucleotide
tcatccaaacagttaa

SEQ ID NO: 385 - DNA, 16 bp, Artificial Sequence
  Description of Artificial Sequence: Synthetic oligonucleotide
caaaacttgtaggtgg

SEQ ID NO: 386 - DNA, 16 bp, Artificial Sequence
  Description of Artificial Sequence: Synthetic oligonucleotide
ccaaaacttgtaggtg

SEQ ID NO: 387 - DNA, 16 bp, Artificial Sequence
  Description of Artificial Sequence: Synthetic oligonucleotide
tccaaaacttgtaggt

SEQ ID NO: 388 - DNA, 16 bp, Artificial Sequence
  Description of Artificial Sequence: Synthetic oligonucleotide
gtccaaaacttgtagg

SEQ ID NO: 389 - DNA, 16 bp, Artificial Sequence
  Description of Artificial Sequence: Synthetic oligonucleotide
ggtccaaaacttgtag

SEQ ID NO: 390 - DNA, 16 bp, Artificial Sequence
  Description of Artificial Sequence: Synthetic oligonucleotide
tggtccaaaacttgta

SEQ ID NO: 391 - DNA, 16 bp, Artificial Sequence
  Description of Artificial Sequence: Synthetic oligonucleotide
gtggtccaaaacttgt

SEQ ID NO: 392 - DNA, 16 bp, Artificial Sequence
  Description of Artificial Sequence: Synthetic oligonucleotide
agtggtccaaaacttg

SEQ ID NO: 393 - DNA, 16 bp, Artificial Sequence
  Description of Artificial Sequence: Synthetic oligonucleotide
tagtggtccaaaactt

SEQ ID NO: 394 - DNA, 16 bp, Artificial Sequence
  Description of Artificial Sequence: Synthetic oligonucleotide
ctagtggtccaaaact

SEQ ID NO: 395 - DNA, 16 bp, Artificial Sequence
  Description of Artificial Sequence: Synthetic oligonucleotide
actagtggtccaaaac

SEQ ID NO: 396 - DNA, 16 bp, Artificial Sequence
  Description of Artificial Sequence: Synthetic oligonucleotide
catcctgattatgtac

SEQ ID NO: 397 - DNA, 16 bp, Artificial Sequence
  Description of Artificial Sequence: Synthetic oligonucleotide
acatcctgattatgta

SEQ ID NO: 398 - DNA, 16 bp, Artificial Sequence
  Description of Artificial Sequence: Synthetic oligonucleotide
tacatcctgattatgt

SEQ ID NO: 399 - DNA, 16 bp, Artificial Sequence
  Description of Artificial Sequence: Synthetic oligonucleotide
ttacatcctgattatg

SEQ ID NO: 400 - DNA, 16 bp, Artificial Sequence
  Description of Artificial Sequence: Synthetic oligonucleotide
tttacatcctgattat

SEQ ID NO: 401 - DNA, 16 bp, Artificial Sequence
  Description of Artificial Sequence: Synthetic oligonucleotide
gtttacatcctgatta

SEQ ID NO: 402 - DNA, 16 bp, Artificial Sequence
  Description of Artificial Sequence: Synthetic oligonucleotide
agtttacatcctgatt

SEQ ID NO: 403 - DNA, 16 bp, Artificial Sequence
  Description of Artificial Sequence: Synthetic oligonucleotide
aagtttacatcctgat

SEQ ID NO: 404 - DNA, 16 bp, Artificial Sequence
  Description of Artificial Sequence: Synthetic oligonucleotide
taagtttacatcctga

SEQ ID NO: 405 - DNA, 16 bp, Artificial Sequence
  Description of Artificial Sequence: Synthetic oligonucleotide
gtaagtttacatcctg

SEQ ID NO: 406 - DNA, 16 bp, Artificial Sequence
  Description of Artificial Sequence: Synthetic oligonucleotide
tgtaagtttacatcct

SEQ ID NO: 407 - DNA, 16 bp, Artificial Sequence
  Description of Artificial Sequence: Synthetic oligonucleotide
atgtaagtttacatcc

SEQ ID NO: 408 - DNA, 16 bp, Artificial Sequence
  Description of Artificial Sequence: Synthetic oligonucleotide
tatgtaagtttacatc

SEQ ID NO: 409 - DNA, 16 bp, Artificial Sequence
  Description of Artificial Sequence: Synthetic oligonucleotide
ctatgtaagtttacat

SEQ ID NO: 410 - DNA, 16 bp, Artificial Sequence
  Description of Artificial Sequence: Synthetic oligonucleotide
gctatgtaagtttaca

SEQ ID NO: 411 - DNA, 16 bp, Artificial Sequence
  Description of Artificial Sequence: Synthetic oligonucleotide
agctatgtaagtttac

SEQ ID NO: 412 - DNA, 16 bp, Artificial Sequence
  Description of Artificial Sequence: Synthetic oligonucleotide
gagctatgtaagttta

SEQ ID NO: 413 - DNA, 16 bp, Artificial Sequence
  Description of Artificial Sequence: Synthetic oligonucleotide
tagtgcgtttatctag

SEQ ID NO: 414 - DNA, 16 bp, Artificial Sequence
  Description of Artificial Sequence: Synthetic oligonucleotide
gtagtgcgtttatcta

SEQ ID NO: 415 - DNA, 16 bp, Artificial Sequence
  Description of Artificial Sequence: Synthetic oligonucleotide
cagctactgaaaagca

SEQ ID NO: 416 - DNA, 16 bp, Artificial Sequence
  Description of Artificial Sequence: Synthetic oligonucleotide
gcagctactgaaaagc

SEQ ID NO: 417 - DNA, 16 bp, Artificial Sequence
  Description of Artificial Sequence: Synthetic oligonucleotide
tgcagctactgaaaag

SEQ ID NO: 418 - DNA, 16 bp, Artificial Sequence
  Description of Artificial Sequence: Synthetic oligonucleotide
gtgcagctactgaaaa

SEQ ID NO: 419 - DNA, 16 bp, Artificial Sequence
  Description of Artificial Sequence: Synthetic oligonucleotide
agtgcagctactgaaa

SEQ ID NO: 420 - DNA, 16 bp, Artificial Sequence
  Description of Artificial Sequence: Synthetic oligonucleotide
tttgaaaagcaacatt

SEQ ID NO: 421 - DNA, 16 bp, Artificial Sequence
  Description of Artificial Sequence: Synthetic oligonucleotide
gtttgaaaagcaacat

SEQ ID NO: 422 - DNA, 16 bp, Artificial Sequence
  Description of Artificial Sequence: Synthetic oligonucleotide
agtttgaaaagcaaca

SEQ ID NO: 423 - DNA, 16 bp, Artificial Sequence
  Description of Artificial Sequence: Synthetic oligonucleotide
cagtttgaaaagcaac

SEQ ID NO: 424 - DNA, 16 bp, Artificial Sequence
  Description of Artificial Sequence: Synthetic oligonucleotide
acagtttgaaaagcaa

SEQ ID NO: 425 - DNA, 16 bp, Artificial Sequence
  Description of Artificial Sequence: Synthetic oligonucleotide
gacagtttgaaaagca

SEQ ID NO: 426 - DNA, 16 bp, Artificial Sequence
  Description of Artificial Sequence: Synthetic oligonucleotide
tgacagtttgaaaagc

SEQ ID NO: 427 - DNA, 16 bp, Artificial Sequence
  Description of Artificial Sequence: Synthetic oligonucleotide
ttgacagtttgaaaag

SEQ ID NO: 428 - DNA, 16 bp, Artificial Sequence
  Description of Artificial Sequence: Synthetic oligonucleotide
tttgacagtttgaaaa

SEQ ID NO: 429 - DNA, 16 bp, Artificial Sequence
  Description of Artificial Sequence: Synthetic oligonucleotide
gtttgacagtttgaaa

SEQ ID NO: 430 - DNA, 16 bp, Artificial Sequence
  Description of Artificial Sequence: Synthetic oligonucleotide
ggtttgacagtttgaa

SEQ ID NO: 431 - DNA, 16 bp, Artificial Sequence
  Description of Artificial Sequence: Synthetic oligonucleotide
gggtttgacagtttga

SEQ ID NO: 432 - DNA, 16 bp, Artificial Sequence
  Description of Artificial Sequence: Synthetic oligonucleotide
cgggtttgacagtttg

SEQ ID NO: 433 - DNA, 16 bp, Artificial Sequence
  Description of Artificial Sequence: Synthetic oligonucleotide
ccgggtttgacagttt

SEQ ID NO: 434 - DNA, 16 bp, Artificial Sequence
  Description of Artificial Sequence: Synthetic oligonucleotide
accgggtttgacagtt

SEQ ID NO: 435 - DNA, 16 bp, Artificial Sequence
  Description of Artificial Sequence: Synthetic oligonucleotide
taccgggtttgacagt

SEQ ID NO: 436 - DNA, 16 bp, Artificial Sequence
  Description of Artificial Sequence: Synthetic oligonucleotide
ttaccgggtttgacag

SEQ ID NO: 437 - DNA, 16 bp, Artificial Sequence
  Description of Artificial Sequence: Synthetic oligonucleotide
attaccgggtttgaca

SEQ ID NO: 438 - DNA, 16 bp, Artificial Sequence
  Description of Artificial Sequence: Synthetic oligonucleotide
aattaccgggtttgac

SEQ ID NO: 439 - DNA, 16 bp, Artificial Sequence
  Description of Artificial Sequence: Synthetic oligonucleotide
aaattaccgggtttga

SEQ ID NO: 440 - DNA, 16 bp, Artificial Sequence
  Description of Artificial Sequence: Synthetic oligonucleotide
aaaattaccgggtttg

SEQ ID NO: 441 - DNA, 16 bp, Artificial Sequence
  Description of Artificial Sequence: Synthetic oligonucleotide
taaaattaccgggttt

SEQ ID NO: 442 - DNA, 16 bp, Artificial Sequence
  Description of Artificial Sequence: Synthetic oligonucleotide
ttaaaattaccgggtt

SEQ ID NO: 443 - DNA, 16 bp, Artificial Sequence
  Description of Artificial Sequence: Synthetic oligonucleotide
acacagcaaagtcata

SEQ ID NO: 444 - DNA, 16 bp, Artificial Sequence
  Description of Artificial Sequence: Synthetic oligonucleotide
gacacagcaaagtcat

SEQ ID NO: 445 - DNA, 16 bp, Artificial Sequence
  Description of Artificial Sequence: Synthetic oligonucleotide
agacacagcaaagtca

SEQ ID NO: 446 - DNA, 16 bp, Artificial Sequence
  Description of Artificial Sequence: Synthetic oligonucleotide
tagacacagcaaagtc

SEQ ID NO: 447 - DNA, 16 bp, Artificial Sequence
  Description of Artificial Sequence: Synthetic oligonucleotide
ttagacacagcaaagt

SEQ ID NO: 448 - DNA, 16 bp, Artificial Sequence
  Description of Artificial Sequence: Synthetic oligonucleotide
ttccttccttaaagaa

SEQ ID NO: 449 - DNA, 16 bp, Artificial Sequence
  Description of Artificial Sequence: Synthetic oligonucleotide
cttccttccttaaaga

SEQ ID NO: 450 - DNA, 16 bp, Artificial Sequence
  Description of Artificial Sequence: Synthetic oligonucleotide
acttccttccttaaag

SEQ ID NO: 451 - DNA, 16 bp, Artificial Sequence
  Description of Artificial Sequence: Synthetic oligonucleotide
aacttccttccttaaa

SEQ ID NO: 452 - DNA, 16 bp, Artificial Sequence
  Description of Artificial Sequence: Synthetic oligonucleotide
gaacttccttccttaa

SEQ ID NO: 453 - DNA, 16 bp, Artificial Sequence
  Description of Artificial Sequence: Synthetic oligonucleotide
agaacttccttcctta

SEQ ID NO: 454 - DNA, 16 bp, Artificial Sequence
  Description of Artificial Sequence: Synthetic oligonucleotide
cagaacttccttcctt

SEQ ID NO: 455 - DNA, 16 bp, Artificial Sequence
  Description of Artificial Sequence: Synthetic oligonucleotide
acagaacttccttcct

SEQ ID NO: 456 - DNA, 16 bp, Artificial Sequence
  Description of Artificial Sequence: Synthetic oligonucleotide
aacagaacttccttcc

SEQ ID NO: 457 - DNA, 16 bp, Artificial Sequence
  Description of Artificial Sequence: Synthetic oligonucleotide
caacagaacttccttc

SEQ ID NO: 458 - DNA, 16 bp, Artificial Sequence
  Description of Artificial Sequence: Synthetic oligonucleotide
tcaacagaacttcctt

SEQ ID NO: 459 - DNA, 16 bp, Artificial Sequence
  Description of Artificial Sequence: Synthetic oligonucleotide
ttcaacagaacttcct

SEQ ID NO: 460 - DNA, 16 bp, Artificial Sequence
  Description of Artificial Sequence: Synthetic oligonucleotide
aagaagaagtgtttta

SEQ ID NO: 461 - DNA, 16 bp, Artificial Sequence
  Description of Artificial Sequence: Synthetic oligonucleotide
aaagaagaagtgtttt

SEQ ID NO: 462 - DNA, 16 bp, Artificial Sequence
  Description of Artificial Sequence: Synthetic oligonucleotide
caaagaagaagtgttt

SEQ ID NO: 463 - DNA, 16 bp, Artificial Sequence
  Description of Artificial Sequence: Synthetic oligonucleotide
gcaaagaagaagtgtt

SEQ ID NO: 464 - DNA, 16 bp, Artificial Sequence
  Description of Artificial Sequence: Synthetic oligonucleotide
agcaaagaagaagtgt

SEQ ID NO: 465 - DNA, 16 bp, Artificial Sequence
  Description of Artificial Sequence: Synthetic oligonucleotide
gagcaaagaagaagtg

SEQ ID NO: 466 - DNA, 16 bp, Artificial Sequence
  Description of Artificial Sequence: Synthetic oligonucleotide
tgagcaaagaagaagt

SEQ ID NO: 467 - DNA, 16 bp, Artificial Sequence
  Description of Artificial Sequence: Synthetic oligonucleotide
ctgagcaaagaagaag

SEQ ID NO: 468 - DNA, 16 bp, Artificial Sequence
  Description of Artificial Sequence: Synthetic oligonucleotide
cctgagcaaagaagaa

SEQ ID NO: 469 - DNA, 16 bp, Artificial Sequence
  Description of Artificial Sequence: Synthetic oligonucleotide
tcctgagcaaagaaga

SEQ ID NO: 470 - DNA, 16 bp, Artificial Sequence
  Description of Artificial Sequence: Synthetic oligonucleotide
atcctgagcaaagaag

SEQ ID NO: 471 - DNA, 16 bp, Artificial Sequence
  Description of Artificial Sequence: Synthetic oligonucleotide
catcctgagcaaagaa

SEQ ID NO: 472 - DNA, 16 bp, Artificial Sequence
  Description of Artificial Sequence: Synthetic oligonucleotide
ccatcctgagcaaaga

SEQ ID NO: 473 - DNA, 16 bp, Artificial Sequence
  Description of Artificial Sequence: Synthetic oligonucleotide
tatcacacattgttgg

SEQ ID NO: 474 - DNA, 16 bp, Artificial Sequence
  Description of Artificial Sequence: Synthetic oligonucleotide
atatcacacattgttg

SEQ ID NO: 475 - DNA, 16 bp, Artificial Sequence
  Description of Artificial Sequence: Synthetic oligonucleotide
gatatcacacattgtt

SEQ ID NO: 476 - DNA, 16 bp, Artificial Sequence
  Description of Artificial Sequence: Synthetic oligonucleotide
tgatatcacacattgt

SEQ ID NO: 477 - DNA, 16 bp, Artificial Sequence
  Description of Artificial Sequence: Synthetic oligonucleotide
ctgatatcacacattg

SEQ ID NO: 478 - DNA, 16 bp, Artificial Sequence
  Description of Artificial Sequence: Synthetic oligonucleotide
tctgatatcacacatt

SEQ ID NO: 479 - DNA, 16 bp, Artificial Sequence
  Description of Artificial Sequence: Synthetic oligonucleotide
gtctgatatcacacat

SEQ ID NO: 480 - DNA, 16 bp, Artificial Sequence
  Description of Artificial Sequence: Synthetic oligonucleotide
tgtctgatatcacaca

SEQ ID NO: 481 - DNA, 16 bp, Artificial Sequence
  Description of Artificial Sequence: Synthetic oligonucleotide
ttgtctgatatcacac

SEQ ID NO: 482 - DNA, 16 bp, Artificial Sequence
  Description of Artificial Sequence: Synthetic oligonucleotide
gttgtctgatatcaca

SEQ ID NO: 483 - DNA, 16 bp, Artificial Sequence
  Description of Artificial Sequence: Synthetic oligonucleotide
agttgtctgatatcac

SEQ ID NO: 484 - DNA, 16 bp, Artificial Sequence
  Description of Artificial Sequence: Synthetic oligonucleotide
caacaacttcaactac

SEQ ID NO: 485 - DNA, 16 bp, Artificial Sequence
  Description of Artificial Sequence: Synthetic oligonucleotide
tcaacaacttcaacta

SEQ ID NO: 486 - DNA, 16 bp, Artificial Sequence
  Description of Artificial Sequence: Synthetic oligonucleotide
atcaacaacttcaact

SEQ ID NO: 487 - DNA, 16 bp, Artificial Sequence
  Description of Artificial Sequence: Synthetic oligonucleotide
tatcaacaacttcaac

SEQ ID NO: 488 - DNA, 16 bp, Artificial Sequence
  Description of Artificial Sequence: Synthetic oligonucleotide
ttatcaacaacttcaa

SEQ ID NO: 489 - DNA, 16 bp, Artificial Sequence
  Description of Artificial Sequence: Synthetic oligonucleotide
cgtaacaatcaaagta

SEQ ID NO: 490 - DNA, 16 bp, Artificial Sequence
  Description of Artificial Sequence: Synthetic oligonucleotide
tcgtaacaatcaaagt

SEQ ID NO: 491 - DNA, 16 bp, Artificial Sequence
  Description of Artificial Sequence: Synthetic oligonucleotide
atcgtaacaatcaaag

SEQ ID NO: 492 - DNA, 16 bp, Artificial Sequence
  Description of Artificial Sequence: Synthetic oligonucleotide
catcgtaacaatcaaa

SEQ ID NO: 493 - DNA, 16 bp, Artificial Sequence
  Description of Artificial Sequence: Synthetic oligonucleotide
ccatcgtaacaatcaa

SEQ ID NO: 494 - DNA, 16 bp, Artificial Sequence
  Description of Artificial Sequence: Synthetic oligonucleotide
accatcgtaacaatca

SEQ ID NO: 495 - DNA, 16 bp, Artificial Sequence
  Description of Artificial Sequence: Synthetic oligonucleotide
caccatcgtaacaatc

SEQ ID NO: 496 - DNA, 16 bp, Artificial Sequence
  Description of Artificial Sequence: Synthetic oligonucleotide
ccaccatcgtaacaat

SEQ ID NO: 497 - DNA, 16 bp, Artificial Sequence
  Description of Artificial Sequence: Synthetic oligonucleotide
gccaccatcgtaacaa

SEQ ID NO: 498 - DNA, 16 bp, Artificial Sequence
  Description of Artificial Sequence: Synthetic oligonucleotide
agccaccatcgtaaca

SEQ ID NO: 499 - DNA, 16 bp, Artificial Sequence
  Description of Artificial Sequence: Synthetic oligonucleotide
cagccaccatcgtaac

SEQ ID NO: 500 - DNA, 16 bp, Artificial Sequence
  Description of Artificial Sequence: Synthetic oligonucleotide
acagccaccatcgtaa

SEQ ID NO: 501 - DNA, 16 bp, Artificial Sequence
  Description of Artificial Sequence: Synthetic oligonucleotide
tacagccaccatcgta

SEQ ID NO: 502 - DNA, 16 bp, Artificial Sequence
  Description of Artificial Sequence: Synthetic oligonucleotide
atacagccaccatcgt

SEQ ID NO: 503 - DNA, 16 bp, Artificial Sequence
  Description of Artificial Sequence: Synthetic oligonucleotide
tagccttaccccattt

SEQ ID NO: 504 - DNA, 16 bp, Artificial Sequence
  Description of Artificial Sequence: Synthetic oligonucleotide
ctagccttaccccatt

SEQ ID NO: 505 - DNA, 16 bp, Artificial Sequence
  Description of Artificial Sequence: Synthetic oligonucleotide
tctagccttaccccat

SEQ ID NO: 506 - DNA, 16 bp, Artificial Sequence
  Description of Artificial Sequence: Synthetic oligonucleotide
gtctagccttacccca

SEQ ID NO: 507 - DNA, 16 bp, Artificial Sequence
  Description of Artificial Sequence: Synthetic oligonucleotide
agtctagccttacccc

SEQ ID NO: 508 - DNA, 16 bp, Artificial Sequence
  Description of Artificial Sequence: Synthetic oligonucleotide
aagtctagccttaccc

SEQ ID NO: 509 - DNA, 16 bp, Artificial Sequence
  Description of Artificial Sequence: Synthetic oligonucleotide
aaagtctagccttacc

SEQ ID NO: 510 - DNA, 16 bp, Artificial Sequence
  Description of Artificial Sequence: Synthetic oligonucleotide
taaagtctagccttac

SEQ ID NO: 511 - DNA, 16 bp, Artificial Sequence
  Description of Artificial Sequence: Synthetic oligonucleotide
ataaagtctagcctta

SEQ ID NO: 512 - DNA, 16 bp, Artificial Sequence
  Description of Artificial Sequence: Synthetic oligonucleotide
aataaagtctagcctt

SEQ ID NO: 513 - DNA, 16 bp, Artificial Sequence
  Description of Artificial Sequence: Synthetic oligonucleotide
taataaagtctagcct

SEQ ID NO: 514 - DNA, 16 bp, Artificial Sequence
  Description of Artificial Sequence: Synthetic oligonucleotide
ataataaagtctagcc

SEQ ID NO: 515 - DNA, 16 bp, Artificial Sequence
  Description of Artificial Sequence: Synthetic oligonucleotide
cataataaagtctagc

SEQ ID NO: 516 - DNA, 16 bp, Artificial Sequence
  Description of Artificial Sequence: Synthetic oligonucleotide
tcataataaagtctag

SEQ ID NO: 517 - DNA, 16 bp, Artificial Sequence
  Description of Artificial Sequence: Synthetic oligonucleotide
cctcataactcattga

SEQ ID NO: 518 - DNA, 16 bp, Artificial Sequence
  Description of Artificial Sequence: Synthetic oligonucleotide
tcctcataactcattg

SEQ ID NO: 519 - DNA, 16 bp, Artificial Sequence
  Description of Artificial Sequence: Synthetic oligonucleotide
atcctcataactcatt

SEQ ID NO: 520 - DNA, 16 bp, Artificial Sequence
  Description of Artificial Sequence: Synthetic oligonucleotide
gatcctcataactcat

SEQ ID NO: 521 - DNA, 16 bp, Artificial Sequence
  Description of Artificial Sequence: Synthetic oligonucleotide
tgatcctcataactca

SEQ ID NO: 522 - DNA, 16 bp, Artificial Sequence
  Description of Artificial Sequence: Synthetic oligonucleotide
ttgatcctcataactc

SEQ ID NO: 523 - DNA, 16 bp, Artificial Sequence
  Description of Artificial Sequence: Synthetic oligonucleotide
cttgatcctcataact

SEQ ID NO: 524 - DNA, 16 bp, Artificial Sequence
  Description of Artificial Sequence: Synthetic oligonucleotide
tcttgatcctcataac

SEQ ID NO: 525 - DNA, 16 bp, Artificial Sequence
  Description of Artificial Sequence: Synthetic oligonucleotide
atcttgatcctcataa

SEQ ID NO: 526 - DNA, 16 bp, Artificial Sequence
  Description of Artificial Sequence: Synthetic oligonucleotide
catcttgatcctcata

SEQ ID NO: 527 - DNA, 16 bp, Artificial Sequence
  Description of Artificial Sequence: Synthetic oligonucleotide
gcatcttgatcctcat

SEQ ID NO: 528 - DNA, 16 bp, Artificial Sequence
  Description of Artificial Sequence: Synthetic oligonucleotide
tgcatcttgatcctca

SEQ ID NO: 529 - DNA, 16 bp, Artificial Sequence
  Description of Artificial Sequence: Synthetic oligonucleotide
gtgcatcttgatcctc

SEQ ID NO: 530 - DNA, 16 bp, Artificial Sequence
  Description of Artificial Sequence: Synthetic oligonucleotide
agtgcatcttgatcct

SEQ ID NO: 531 - DNA, 16 bp, Artificial Sequence
  Description of Artificial Sequence: Synthetic oligonucleotide
tagggatgacattacg

SEQ ID NO: 532 - DNA, 16 bp, Artificial Sequence
  Description of Artificial Sequence: Synthetic oligonucleotide
gtagggatgacattac

SEQ ID NO: 533 - DNA, 16 bp, Artificial Sequence
  Description of Artificial Sequence: Synthetic oligonucleotide
gattcatttgagttat

SEQ ID NO: 534 - DNA, 16 bp, Artificial Sequence
  Description of Artificial Sequence: Synthetic oligonucleotide
agattcatttgagtta

SEQ ID NO: 535 - DNA, 16 bp, Artificial Sequence
  Description of Artificial Sequence: Synthetic oligonucleotide
aagattcatttgagtt

SEQ ID NO: 536 - DNA, 16 bp, Artificial Sequence
  Description of Artificial Sequence: Synthetic oligonucleotide
taagattcatttgagt

SEQ ID NO: 537 - DNA, 16 bp, Artificial Sequence
  Description of Artificial Sequence: Synthetic oligonucleotide
ttaagattcatttgag

SEQ ID NO: 538 - DNA, 16 bp, Artificial Sequence
  Description of Artificial Sequence: Synthetic oligonucleotide
cttaagattcatttga

SEQ ID NO: 539 - DNA, 16 bp, Artificial Sequence
  Description of Artificial Sequence: Synthetic oligonucleotide
acttaagattcatttg

SEQ ID NO: 540 - DNA, 16 bp, Artificial Sequence
  Description of Artificial Sequence: Synthetic oligonucleotide
tacttaagattcattt

SEQ ID NO: 541 - DNA, 16 bp, Artificial Sequence
  Description of Artificial Sequence: Synthetic oligonucleotide
atacttaagattcatt

SEQ ID NO: 542 - DNA, 16 bp, Artificial Sequence
  Description of Artificial Sequence: Synthetic oligonucleotide
catacttaagattcat

SEQ ID NO: 543 - DNA, 16 bp, Artificial Sequence
  Description of Artificial Sequence: Synthetic oligonucleotide
gcatacttaagattca

SEQ ID NO: 544 - DNA, 16 bp, Artificial Sequence
  Description of Artificial Sequence: Synthetic oligonucleotide
ggcatacttaagattc

SEQ ID NO: 545 - DNA, 16 bp, Artificial Sequence
  Description of Artificial Sequence: Synthetic oligonucleotide
tggcatacttaagatt

SEQ ID NO: 546 - DNA, 16 bp, Artificial Sequence
  Description of Artificial Sequence: Synthetic oligonucleotide
atggcatacttaagat

SEQ ID NO: 547 - DNA, 16 bp, Artificial Sequence
  Description of Artificial Sequence: Synthetic oligonucleotide
aatggcatacttaaga

SEQ ID NO: 548 - DNA, 16 bp, Artificial Sequence
  Description of Artificial Sequence: Synthetic oligonucleotide
taatggcatacttaag

SEQ ID NO: 549 - DNA, 16 bp, Artificial Sequence
  Description of Artificial Sequence: Synthetic oligonucleotide
ctaatggcatacttaa

SEQ ID NO: 550 - DNA, 16 bp, Artificial Sequence
  Description of Artificial Sequence: Synthetic oligonucleotide
actaatggcatactta

SEQ ID NO: 551 - DNA, 16 bp, Artificial Sequence
  Description of Artificial Sequence: Synthetic oligonucleotide
cactaatggcatactt

SEQ ID NO: 552 - DNA, 16 bp, Artificial Sequence
  Description of Artificial Sequence: Synthetic oligonucleotide
gcactaatggcatact

SEQ ID NO: 553 - DNA, 16 bp, Artificial Sequence
  Description of Artificial Sequence: Synthetic oligonucleotide
tgcactaatggcatac

SEQ ID NO: 554 - DNA, 16 bp, Artificial Sequence
  Description of Artificial Sequence: Synthetic oligonucleotide
ttgcactaatggcata

SEQ ID NO: 555 - DNA, 16 bp, Artificial Sequence
  Description of Artificial Sequence: Synthetic oligonucleotide
tttgcactaatggcat

SEQ ID NO: 556 - DNA, 16 bp, Artificial Sequence
  Description of Artificial Sequence: Synthetic oligonucleotide
ctttgcactaatggca

SEQ ID NO: 557 - DNA, 16 bp, Artificial Sequence
  Description of Artificial Sequence: Synthetic oligonucleotide
tctttgcactaatggc

SEQ ID NO: 558 - DNA, 16 bp, Artificial Sequence
  Description of Artificial Sequence: Synthetic oligonucleotide
ttctttgcactaatgg

SEQ ID NO: 559 - DNA, 16 bp, Artificial Sequence
  Description of Artificial Sequence: Synthetic oligonucleotide
attctttgcactaatg

SEQ ID NO: 560 - DNA, 16 bp, Artificial Sequence
  Description of Artificial Sequence: Synthetic oligonucleotide
tattctttgcactaat

SEQ ID NO: 561 - DNA, 16 bp, Artificial Sequence
  Description of Artificial Sequence: Synthetic oligonucleotide
ctattctttgcactaa

SEQ ID NO: 562 - DNA, 16 bp, Artificial Sequence
  Description of Artificial Sequence: Synthetic oligonucleotide
tctattctttgcacta

SEQ ID NO: 563 - DNA, 16 bp, Artificial Sequence
  Description of Artificial Sequence: Synthetic oligonucleotide
ctctattctttgcact

SEQ ID NO: 564 - DNA, 16 bp, Artificial Sequence
  Description of Artificial Sequence: Synthetic oligonucleotide
gctctattctttgcac

SEQ ID NO: 565 - DNA, 16 bp, Artificial Sequence
  Description of Artificial Sequence: Synthetic oligonucleotide
agctctattctttgca

SEQ ID NO: 566 - DNA, 16 bp, Artificial Sequence
  Description of Artificial Sequence: Synthetic oligonucleotide
gagctctattctttgc

SEQ ID NO: 567 - DNA, 16 bp, Artificial Sequence
  Description of Artificial Sequence: Synthetic oligonucleotide
cgagctctattctttg

SEQ ID NO: 568 - DNA, 16 bp, Artificial Sequence
  Description of Artificial Sequence: Synthetic oligonucleotide
gcgagctctattcttt

SEQ ID NO: 569 - DNA, 16 bp, Artificial Sequence
  Description of Artificial Sequence: Synthetic oligonucleotide
tgcgagctctattctt

SEQ ID NO: 570 - DNA, 16 bp, Artificial Sequence
  Description of Artificial Sequence: Synthetic oligonucleotide
gtgcgagctctattct

SEQ ID NO: 571 - DNA, 16 bp, Artificial Sequence
  Description of Artificial Sequence: Synthetic oligonucleotide
ggtgcgagctctattc

SEQ ID NO: 572 - DNA, 16 bp, Artificial Sequence
  Description of Artificial Sequence: Synthetic oligonucleotide
cggtgcgagctctatt

SEQ ID NO: 573 - DNA, 16 bp, Artificial Sequence
  Description of Artificial Sequence: Synthetic oligonucleotide
acggtgcgagctctat

SEQ ID NO: 574 - DNA, 16 bp, Artificial Sequence
  Description of Artificial Sequence: Synthetic oligonucleotide
tacggtgcgagctcta

SEQ ID NO: 575 - DNA, 16 bp, Artificial Sequence
  Description of Artificial Sequence: Synthetic oligonucleotide
ctacggtgcgagctct

SEQ ID NO: 576 - DNA, 16 bp, Artificial Sequence
  Description of Artificial Sequence: Synthetic oligonucleotide
gctacggtgcgagctc

SEQ ID NO: 577 - DNA, 16 bp, Artificial Sequence
  Description of Artificial Sequence: Synthetic oligonucleotide
agctacggtgcgagct

SEQ ID NO: 578 - DNA, 16 bp, Artificial Sequence
  Description of Artificial Sequence: Synthetic oligonucleotide
cagctacggtgcgagc

SEQ ID NO: 579 - DNA, 16 bp, Artificial Sequence
  Description of Artificial Sequence: Synthetic oligonucleotide
ccagctacggtgcgag

SEQ ID NO: 580 - DNA, 16 bp, Artificial Sequence
  Description of Artificial Sequence: Synthetic oligonucleotide
accagctacggtgcga

SEQ ID NO: 581 - DNA, 16 bp, Artificial Sequence
  Description of Artificial Sequence: Synthetic oligonucleotide
caccagctacggtgcg

SEQ ID NO: 582 - DNA, 16 bp, Artificial Sequence
  Description of Artificial Sequence: Synthetic oligonucleotide
acaccagctacggtgc

SEQ ID NO: 583 - DNA, 16 bp, Artificial Sequence
  Description of Artificial Sequence: Synthetic oligonucleotide
gacaccagctacggtg

SEQ ID NO: 584 - DNA, 16 bp, Artificial Sequence
  Description of Artificial Sequence: Synthetic oligonucleotide
agacaccagctacggt

SEQ ID NO: 585 - DNA, 16 bp, Artificial Sequence
  Description of Artificial Sequence: Synthetic oligonucleotide
gagacaccagctacgg

SEQ ID NO: 586 - DNA, 16 bp, Artificial Sequence
  Description of Artificial Sequence: Synthetic oligonucleotide
agagacaccagctacg

SEQ ID NO: 587 - DNA, 16 bp, Artificial Sequence
  Description of Artificial Sequence: Synthetic oligonucleotide
tagagacaccagctac

SEQ ID NO: 588 - DNA, 16 bp, Artificial Sequence
  Description of Artificial Sequence: Synthetic oligonucleotide
atagagacaccagcta

SEQ ID NO: 589 - DNA, 16 bp, Artificial Sequence
  Description of Artificial Sequence: Synthetic oligonucleotide
gatagagacaccagct

SEQ ID NO: 590 - DNA, 16 bp, Artificial Sequence
  Description of Artificial Sequence: Synthetic oligonucleotide
agatagagacaccagc

SEQ ID NO: 591 - DNA, 16 bp, Artificial Sequence
  Description of Artificial Sequence: Synthetic oligonucleotide
cagatagagacaccag

SEQ ID NO: 592 - DNA, 16 bp, Artificial Sequence
  Description of Artificial Sequence: Synthetic oligonucleotide
acagatagagacacca

SEQ ID NO: 593 - DNA, 16 bp, Artificial Sequence
  Description of Artificial Sequence: Synthetic oligonucleotide
tacagatagagacacc

SEQ ID NO: 594 - DNA, 16 bp, Artificial Sequence
  Description of Artificial Sequence: Synthetic oligonucleotide
ctacagatagagacac

SEQ ID NO: 595 - DNA, 16 bp, Artificial Sequence
  Description of Artificial Sequence: Synthetic oligonucleotide
actacagatagagaca

SEQ ID NO: 596 - DNA, 16 bp, Artificial Sequence
  Description of Artificial Sequence: Synthetic oligonucleotide
tactacagatagagac

SEQ ID NO: 597 - DNA, 16 bp, Artificial Sequence
  Description of Artificial Sequence: Synthetic oligonucleotide
gtactacagatagaga

SEQ ID NO: 598 - DNA, 16 bp, Artificial Sequence
  Description of Artificial Sequence: Synthetic oligonucleotide
agtactacagatagag

SEQ ID NO: 599 - DNA, 16 bp, Artificial Sequence
  Description of Artificial Sequence: Synthetic oligonucleotide
tagtactacagataga

SEQ ID NO: 600 - DNA, 16 bp, Artificial Sequence
  Description of Artificial Sequence: Synthetic oligonucleotide
atagtactacagatag

SEQ ID NO: 601 - DNA, 16 bp, Artificial Sequence
  Description of Artificial Sequence: Synthetic oligonucleotide
catagtactacagata

SEQ ID NO: 602 - DNA, 16 bp, Artificial Sequence
  Description of Artificial Sequence: Synthetic oligonucleotide
tcatagtactacagat

SEQ ID NO: 603 - DNA, 16 bp, Artificial Sequence
  Description of Artificial Sequence: Synthetic oligonucleotide
gtcatagtactacaga

SEQ ID NO: 604 - DNA, 16 bp, Artificial Sequence
  Description of Artificial Sequence: Synthetic oligonucleotide
gatgaaactgtctatt

SEQ ID NO: 605 - DNA, 16 bp, Artificial Sequence
  Description of Artificial Sequence: Synthetic oligonucleotide
tgatgaaactgtctat

SEQ ID NO: 606 - DNA, 16 bp, Artificial Sequence
  Description of Artificial Sequence: Synthetic oligonucleotide
tagtggcggctattga

SEQ ID NO: 607 - DNA, 16 bp, Artificial Sequence
  Description of Artificial Sequence: Synthetic oligonucleotide
ctagtggcggctattg

SEQ ID NO: 608 - DNA, 16 bp, Artificial Sequence
  Description of Artificial Sequence: Synthetic oligonucleotide
tctagtggcggctatt

SEQ ID NO: 609 - DNA, 16 bp, Artificial Sequence
  Description of Artificial Sequence: Synthetic oligonucleotide
ctctagtggcggctat

SEQ ID NO: 610 - DNA, 16 bp, Artificial Sequence
  Description of Artificial Sequence: Synthetic oligonucleotide
cctctagtggcggcta

SEQ ID NO: 611 - DNA, 16 bp, Artificial Sequence
  Description of Artificial Sequence: Synthetic oligonucleotide
tcctctagtggcggct

SEQ ID NO: 612 - DNA, 16 bp, Artificial Sequence
  Description of Artificial Sequence: Synthetic oligonucleotide
ctcctctagtggcggc

SEQ ID NO: 613 - DNA, 16 bp, Artificial Sequence
  Description of Artificial Sequence: Synthetic oligonucleotide
gctcctctagtggcgg

SEQ ID NO: 614 - DNA, 16 bp, Artificial Sequence
  Description of Artificial Sequence: Synthetic oligonucleotide
agctcctctagtggcg

SEQ ID NO: 615 - DNA, 16 bp, Artificial Sequence
  Description of Artificial Sequence: Synthetic oligonucleotide
tagctcctctagtggc

SEQ ID NO: 616 - DNA, 16 bp, Artificial Sequence
  Description of Artificial Sequence: Synthetic oligonucleotide
gtagctcctctagtgg

SEQ ID NO: 617 - DNA, 16 bp, Artificial Sequence
  Description of Artificial Sequence: Synthetic oligonucleotide
agtagctcctctagtg

SEQ ID NO: 618 - DNA, 16 bp, Artificial Sequence
  Description of Artificial Sequence: Synthetic oligonucleotide
cagtagctcctctagt

SEQ ID NO: 619 - DNA, 16 bp, Artificial Sequence
  Description of Artificial Sequence: Synthetic oligonucleotide
acagtagctcctctag

SEQ ID NO: 620 - DNA, 16 bp, Artificial Sequence
  Description of Artificial Sequence: Synthetic oligonucleotide
tgcttgttccaattac

SEQ ID NO: 621 - DNA, 16 bp, Artificial Sequence
  Description of Artificial Sequence: Synthetic oligonucleotide
ttgcttgttccaatta

SEQ ID NO: 622 - DNA, 16 bp, Artificial Sequence
  Description of Artificial Sequence: Synthetic oligonucleotide
aaacagtttttaacat

SEQ ID NO: 623 - DNA, 16 bp, Artificial Sequence
  Description of Artificial Sequence: Synthetic oligonucleotide
taaacagtttttaaca

SEQ ID NO: 624 - DNA, 16 bp, Artificial Sequence
  Description of Artificial Sequence: Synthetic oligonucleotide
cccaacccataaggtg

SEQ ID NO: 625 - DNA, 16 bp, Artificial Sequence
  Description of Artificial Sequence: Synthetic oligonucleotide
tcccaacccataaggt

SEQ ID NO: 626 - DNA, 16 bp, Artificial Sequence
  Description of Artificial Sequence: Synthetic oligonucleotide
tgttaggcatggctct

SEQ ID NO: 627 - DNA, 16 bp, Artificial Sequence
  Description of Artificial Sequence: Synthetic oligonucleotide
atgttaggcatggctc

SEQ ID NO: 628 - DNA, 16 bp, Artificial Sequence
  Description of Artificial Sequence: Synthetic oligonucleotide
catgttaggcatggct

SEQ ID NO: 629 - DNA, 16 bp, Artificial Sequence
  Description of Artificial Sequence: Synthetic oligonucleotide
gcatgttaggcatggc

SEQ ID NO: 630 - DNA, 16 bp, Artificial Sequence
  Description of Artificial Sequence: Synthetic oligonucleotide
agcatgttaggcatgg

SEQ ID NO: 631 - DNA, 16 bp, Artificial Sequence
  Description of Artificial Sequence: Synthetic oligonucleotide
aagcatgttaggcatg

SEQ ID NO: 632 - DNA, 16 bp, Artificial Sequence
  Description of Artificial Sequence: Synthetic oligonucleotide
taagcatgttaggcat

SEQ ID NO: 633 - DNA, 16 bp, Artificial Sequence
  Description of Artificial Sequence: Synthetic oligonucleotide
ctaagcatgttaggca

SEQ ID NO: 634 - DNA, 16 bp, Artificial Sequence
  Description of Artificial Sequence: Synthetic oligonucleotide
tgcgagcaagaacaag

SEQ ID NO: 635 - DNA, 16 bp, Artificial Sequence
  Description of Artificial Sequence: Synthetic oligonucleotide
ttgcgagcaagaacaa

SEQ ID NO: 636 - DNA, 16 bp, Artificial Sequence
  Description of Artificial Sequence: Synthetic oligonucleotide
tttgcgagcaagaaca

SEQ ID NO: 637 - DNA, 16 bp, Artificial Sequence
  Description of Artificial Sequence: Synthetic oligonucleotide
gtttgcgagcaagaac

SEQ ID NO: 638 - DNA, 16 bp, Artificial Sequence
  Description of Artificial Sequence: Synthetic oligonucleotide
tgtttgcgagcaagaa

SEQ ID NO: 639 - DNA, 16 bp, Artificial Sequence
  Description of Artificial Sequence: Synthetic oligonucleotide
atgtttgcgagcaaga

SEQ ID NO: 640 - DNA, 16 bp, Artificial Sequence
  Description of Artificial Sequence: Synthetic oligonucleotide
tatgtttgcgagcaag

SEQ ID NO: 641 - DNA, 16 bp, Artificial Sequence
  Description of Artificial Sequence: Synthetic oligonucleotide
cgccacacatgaccat

SEQ ID NO: 642 - DNA, 16 bp, Artificial Sequence
  Description of Artificial Sequence: Synthetic oligonucleotide
ccgccacacatgacca

SEQ ID NO: 643 - DNA, 16 bp, Artificial Sequence
  Description of Artificial Sequence: Synthetic oligonucleotide
tagcataagcagttgt

SEQ ID NO: 644 - DNA, 16 bp, Artificial Sequence
  Description of Artificial Sequence: Synthetic oligonucleotide
ttagcataagcagttg

SEQ ID NO: 645 - DNA, 16 bp, Artificial Sequence
  Description of Artificial Sequence: Synthetic oligonucleotide
attagcataagcagtt

SEQ ID NO: 646 - DNA, 16 bp, Artificial Sequence
  Description of Artificial Sequence: Synthetic oligonucleotide
tattagcataagcagt

SEQ ID NO: 647 - DNA, 16 bp, Artificial Sequence
  Description of Artificial Sequence: Synthetic oligonucleotide
ctattagcataagcag

SEQ ID NO: 648 - DNA, 16 bp, Artificial Sequence
  Description of Artificial Sequence: Synthetic oligonucleotide
actattagcataagca

SEQ ID NO: 649 - DNA, 16 bp, Artificial Sequence
  Description of Artificial Sequence: Synthetic oligonucleotide
cactattagcataagc

SEQ ID NO: 650 - DNA, 16 bp, Artificial Sequence
  Description of Artificial Sequence: Synthetic oligonucleotide
acactattagcataag

SEQ ID NO: 651 - DNA, 16 bp, Artificial Sequence
  Description of Artificial Sequence: Synthetic oligonucleotide
cttgacaaatgttaaa

SEQ ID NO: 652 - DNA, 16 bp, Artificial Sequence
  Description of Artificial Sequence: Synthetic oligonucleotide
gcttgacaaatgttaa

SEQ ID NO: 653 - DNA, 16 bp, Artificial Sequence
  Description of Artificial Sequence: Synthetic oligonucleotide
tatagagacactcata

SEQ ID NO: 654 - DNA, 16 bp, Artificial Sequence
  Description of Artificial Sequence: Synthetic oligonucleotide
ctatagagacactcat

SEQ ID NO: 655 - DNA, 16 bp, Artificial Sequence
  Description of Artificial Sequence: Synthetic oligonucleotide
tctatagagacactca

SEQ ID NO: 656 - DNA, 16 bp, Artificial Sequence
  Description of Artificial Sequence: Synthetic oligonucleotide
ttctatagagacactc

SEQ ID NO: 657 - DNA, 16 bp, Artificial Sequence
  Description of Artificial Sequence: Synthetic oligonucleotide
tttctatagagacact

SEQ ID NO: 658 - DNA, 16 bp, Artificial Sequence
  Description of Artificial Sequence: Synthetic oligonucleotide
atttctatagagacac

SEQ ID NO: 659 - DNA, 16 bp, Artificial Sequence
  Description of Artificial Sequence: Synthetic oligonucleotide
tatttctatagagaca

SEQ ID NO: 660 - DNA, 16 bp, Artificial Sequence
  Description of Artificial Sequence: Synthetic oligonucleotide
ctatttctatagagac

SEQ ID NO: 661 - DNA, 16 bp, Artificial Sequence
  Description of Artificial Sequence: Synthetic oligonucleotide
gagaaatgtttacgca

SEQ ID NO: 662 - DNA, 16 bp, Artificial Sequence
  Description of Artificial Sequence: Synthetic oligonucleotide
ggtcagtctcagtcca

SEQ ID NO: 663 - DNA, 16 bp, Artificial Sequence
  Description of Artificial Sequence: Synthetic oligonucleotide
aggtcagtctcagtcc

SEQ ID NO: 664 - DNA, 16 bp, Artificial Sequence
  Description of Artificial Sequence: Synthetic oligonucleotide
aaggtcagtctcagtc

SEQ ID NO: 665 - DNA, 16 bp, Artificial Sequence
  Description of Artificial Sequence: Synthetic oligonucleotide
taaggtcagtctcagt

SEQ ID NO: 666 - DNA, 16 bp, Artificial Sequence
  Description of Artificial Sequence: Synthetic oligonucleotide
gtaaggtcagtctcag

SEQ ID NO: 667 - DNA, 16 bp, Artificial Sequence
  Description of Artificial Sequence: Synthetic oligonucleotide
agtaaggtcagtctca

SEQ ID NO: 668 - DNA, 16 bp, Artificial Sequence
  Description of Artificial Sequence: Synthetic oligonucleotide
tagtaaggtcagtctc

SEQ ID NO: 669 - DNA, 16 bp, Artificial Sequence
  Description of Artificial Sequence: Synthetic oligonucleotide
ttagtaaggtcagtct

SEQ ID NO: 670 - DNA, 16 bp, Artificial Sequence
  Description of Artificial Sequence: Synthetic oligonucleotide
tttagtaaggtcagtc

SEQ ID NO: 671 - DNA, 16 bp, Artificial Sequence
  Description of Artificial Sequence: Synthetic oligonucleotide
ctttagtaaggtcagt

SEQ ID NO: 672 - DNA, 16 bp, Artificial Sequence
  Description of Artificial Sequence: Synthetic oligonucleotide
cctttagtaaggtcag

SEQ ID NO: 673 - DNA, 16 bp, Artificial Sequence
  Description of Artificial Sequence: Synthetic oligonucleotide
tcctttagtaaggtca

SEQ ID NO: 674 - DNA, 16 bp, Artificial Sequence
  Description of Artificial Sequence: Synthetic oligonucleotide
gtcctttagtaaggtc

SEQ ID NO: 675 - DNA, 16 bp, Artificial Sequence
  Description of Artificial Sequence: Synthetic oligonucleotide
ggtcctttagtaaggt

SEQ ID NO: 676 - DNA, 16 bp, Artificial Sequence
  Description of Artificial Sequence: Synthetic oligonucleotide
aggtcctttagtaagg

SEQ ID NO: 677 - DNA, 16 bp, Artificial Sequence
  Description of Artificial Sequence: Synthetic oligonucleotide
gaggtcctttagtaag

SEQ ID NO: 678 - DNA, 16 bp, Artificial Sequence
  Description of Artificial Sequence: Synthetic oligonucleotide
tgaggtcctttagtaa

SEQ ID NO: 679 - DNA, 16 bp, Artificial Sequence
  Description of Artificial Sequence: Synthetic oligonucleotide
taactagcattgtatg

SEQ ID NO: 680 - DNA, 16 bp, Artificial Sequence
  Description of Artificial Sequence: Synthetic oligonucleotide
ttaactagcattgtat

SEQ ID NO: 681 - DNA, 16 bp, Artificial Sequence
  Description of Artificial Sequence: Synthetic oligonucleotide
tttaactagcattgta

SEQ ID NO: 682 - DNA, 16 bp, Artificial Sequence
  Description of Artificial Sequence: Synthetic oligonucleotide
gtttaactagcattgt

SEQ ID NO: 683 - DNA, 16 bp, Artificial Sequence
  Description of Artificial Sequence: Synthetic oligonucleotide
tgtttaactagcattg

SEQ ID NO: 684 - DNA, 16 bp, Artificial Sequence
  Description of Artificial Sequence: Synthetic oligonucleotide
atggatctgggtaagg

SEQ ID NO: 685 - DNA, 16 bp, Artificial Sequence
  Description of Artificial Sequence: Synthetic oligonucleotide
gatggatctgggtaag

SEQ ID NO: 686 - DNA, 16 bp, Artificial Sequence
  Description of Artificial Sequence: Synthetic oligonucleotide
gtgtaccatctgtttt

SEQ ID NO: 687 - DNA, 16 bp, Artificial Sequence
  Description of Artificial Sequence: Synthetic oligonucleotide
agtgtaccatctgttt

SEQ ID NO: 688 - DNA, 16 bp, Artificial Sequence
  Description of Artificial Sequence: Synthetic oligonucleotide
aagtgtaccatctgtt

SEQ ID NO: 689 - DNA, 16 bp, Artificial Sequence
  Description of Artificial Sequence: Synthetic oligonucleotide
taagtgtaccatctgt

SEQ ID NO: 690 - DNA, 16 bp, Artificial Sequence
  Description of Artificial Sequence: Synthetic oligonucleotide
ataagtgtaccatctg

SEQ ID NO: 691 - DNA, 16 bp, Artificial Sequence
  Description of Artificial Sequence: Synthetic oligonucleotide
cataagtgtaccatct

SEQ ID NO: 692 - DNA, 16 bp, Artificial Sequence
  Description of Artificial Sequence: Synthetic oligonucleotide
tcataagtgtaccatc

SEQ ID NO: 693 - DNA, 16 bp, Artificial Sequence
  Description of Artificial Sequence: Synthetic oligonucleotide
atcataagtgtaccat

SEQ ID NO: 694 - DNA, 16 bp, Artificial Sequence
  Description of Artificial Sequence: Synthetic oligonucleotide
aatcataagtgtacca

SEQ ID NO: 695 - DNA, 16 bp, Artificial Sequence
  Description of Artificial Sequence: Synthetic oligonucleotide
caatcataagtgtacc

SEQ ID NO: 696 - DNA, 16 bp, Artificial Sequence
  Description of Artificial Sequence: Synthetic oligonucleotide
tcaatcataagtgtac

SEQ ID NO: 697 - DNA, 16 bp, Artificial Sequence
  Description of Artificial Sequence: Synthetic oligonucleotide
catactcctgattagg

SEQ ID NO: 698 - DNA, 16 bp, Artificial Sequence
  Description of Artificial Sequence: Synthetic oligonucleotide
gcatactcctgattag

SEQ ID NO: 699 - DNA, 16 bp, Artificial Sequence
  Description of Artificial Sequence: Synthetic oligonucleotide
agcatactcctgatta

SEQ ID NO: 700 - DNA, 16 bp, Artificial Sequence
  Description of Artificial Sequence: Synthetic oligonucleotide
cagcatactcctgatt

SEQ ID NO: 701 - DNA, 16 bp, Artificial Sequence
  Description of Artificial Sequence: Synthetic oligonucleotide
tcagcatactcctgat

SEQ ID NO: 702 - DNA, 16 bp, Artificial Sequence
  Description of Artificial Sequence: Synthetic oligonucleotide
atcagcatactcctga

SEQ ID NO: 703 - DNA, 16 bp, Artificial Sequence
  Description of Artificial Sequence: Synthetic oligonucleotide
catcagcatactcctg

SEQ ID NO: 704 - DNA, 16 bp, Artificial Sequence
  Description of Artificial Sequence: Synthetic oligonucleotide
acatcagcatactcct

SEQ ID NO: 705 - DNA, 16 bp, Artificial Sequence
  Description of Artificial Sequence: Synthetic oligonucleotide
aaaactcaggttccca

SEQ ID NO: 706 - DNA, 16 bp, Artificial Sequence
  Description of Artificial Sequence: Synthetic oligonucleotide
taaaactcaggttccc

SEQ ID NO: 707 - DNA, 16 bp, Artificial Sequence
  Description of Artificial Sequence: Synthetic oligonucleotide
ataaaactcaggttcc

SEQ ID NO: 708 - DNA, 16 bp, Artificial Sequence
  Description of Artificial Sequence: Synthetic oligonucleotide
cataaaactcaggttc

SEQ ID NO: 709 - DNA, 16 bp, Artificial Sequence
  Description of Artificial Sequence: Synthetic oligonucleotide
tcataaaactcaggtt

SEQ ID NO: 710 - DNA, 16 bp, Artificial Sequence
  Description of Artificial Sequence: Synthetic oligonucleotide
tagctcatacctccta

SEQ ID NO: 711 - DNA, 16 bp, Artificial Sequence
  Description of Artificial Sequence: Synthetic oligonucleotide
atagctcatacctcct

SEQ ID NO: 712 - DNA, 16 bp, Artificial Sequence
  Description of Artificial Sequence: Synthetic oligonucleotide
aatagctcatacctcc

SEQ ID NO: 713 - DNA, 16 bp, Artificial Sequence
  Description of Artificial Sequence: Synthetic oligonucleotide
taatagctcatacctc

SEQ ID NO: 714 - DNA, 16 bp, Artificial Sequence
  Description of Artificial Sequence: Synthetic oligonucleotide
atggaaaactaatggg

SEQ ID NO: 715 - DNA, 16 bp, Artificial Sequence
  Description of Artificial Sequence: Synthetic oligonucleotide
aatggaaaactaatgg

SEQ ID NO: 716 - DNA, 16 bp, Artificial Sequence
  Description of Artificial Sequence: Synthetic oligonucleotide
aaccagtaaagacata

SEQ ID NO: 717 - DNA, 16 bp, Artificial Sequence
  Description of Artificial Sequence: Synthetic oligonucleotide
taaccagtaaagacat

SEQ ID NO: 718 - DNA, 16 bp, Artificial Sequence
  Description of Artificial Sequence: Synthetic oligonucleotide
caaaggtgtactctcc

SEQ ID NO: 719 - DNA, 16 bp, Artificial Sequence
  Description of Artificial Sequence: Synthetic oligonucleotide
tcaaaggtgtactctc

SEQ ID NO: 720 - DNA, 16 bp, Artificial Sequence
  Description of Artificial Sequence: Synthetic oligonucleotide
ttcaaaggtgtactct

SEQ ID NO: 721 - DNA, 16 bp, Artificial Sequence
  Description of Artificial Sequence: Synthetic oligonucleotide
tttcaaaggtgtactc

SEQ ID NO: 722 - DNA, 16 bp, Artificial Sequence
  Description of Artificial Sequence: Synthetic oligonucleotide
ttttcaaaggtgtact

SEQ ID NO: 723 - DNA, 16 bp, Artificial Sequence
  Description of Artificial Sequence: Synthetic oligonucleotide
tttttcaaaggtgtac

SEQ ID NO: 724 - DNA, 16 bp, Artificial Sequence
  Description of Artificial Sequence: Synthetic oligonucleotide
ctttttcaaaggtgta

SEQ ID NO: 725 - DNA, 16 bp, Artificial Sequence
  Description of Artificial Sequence: Synthetic oligonucleotide
cctttttcaaaggtgt

SEQ ID NO: 726 - DNA, 16 bp, Artificial Sequence
  Description of Artificial Sequence: Synthetic oligonucleotide
acctttttcaaaggtg

SEQ ID NO: 727 - DNA, 16 bp, Artificial Sequence
  Description of Artificial Sequence: Synthetic oligonucleotide
cacctttttcaaaggt

SEQ ID NO: 728 - DNA, 16 bp, Artificial Sequence
  Description of Artificial Sequence: Synthetic oligonucleotide
tcacctttttcaaagg

SEQ ID NO: 729 - DNA, 16 bp, Artificial Sequence
  Description of Artificial Sequence: Synthetic oligonucleotide
gtcacctttttcaaag

SEQ ID NO: 730 - DNA, 16 bp, Artificial Sequence
  Description of Artificial Sequence: Synthetic oligonucleotide
agtcacctttttcaaa

SEQ ID NO: 731 - DNA, 16 bp, Artificial Sequence
  Description of Artificial Sequence: Synthetic oligonucleotide
tagtcacctttttcaa

SEQ ID NO: 732 - DNA, 16 bp, Artificial Sequence
  Description of Artificial Sequence: Synthetic oligonucleotide
atagtcacctttttca

SEQ ID NO: 733 - DNA, 16 bp, Artificial Sequence
  Description of Artificial Sequence: Synthetic oligonucleotide
catagtcacctttttc

SEQ ID NO: 734 - DNA, 16 bp, Artificial Sequence
  Description of Artificial Sequence: Synthetic oligonucleotide
ccatagtcaccttttt

SEQ ID NO: 735 - DNA, 16 bp, Artificial Sequence
  Description of Artificial Sequence: Synthetic oligonucleotide
accatagtcacctttt

SEQ ID NO: 736 - DNA, 16 bp, Artificial Sequence
  Description of Artificial Sequence: Synthetic oligonucleotide
caccatagtcaccttt

SEQ ID NO: 737 - DNA, 16 bp, Artificial Sequence
  Description of Artificial Sequence: Synthetic oligonucleotide
tcaccatagtcacctt

SEQ ID NO: 738 - DNA, 16 bp, Artificial Sequence
  Description of Artificial Sequence: Synthetic oligonucleotide
atcaccatagtcacct

SEQ ID NO: 739 - DNA, 16 bp, Artificial Sequence
  Description of Artificial Sequence: Synthetic oligonucleotide
catcaccatagtcacc

SEQ ID NO: 740 - DNA, 16 bp, Artificial Sequence
  Description of Artificial Sequence: Synthetic oligonucleotide
gcatcaccatagtcac

SEQ ID NO: 741 - DNA, 16 bp, Artificial Sequence
  Description of Artificial Sequence: Synthetic oligonucleotide
agcatcaccatagtca

SEQ ID NO: 742 - DNA, 16 bp, Artificial Sequence
  Description of Artificial Sequence: Synthetic oligonucleotide
cagcatcaccatagtc

SEQ ID NO: 743 - DNA, 16 bp, Artificial Sequence
  Description of Artificial Sequence: Synthetic oligonucleotide
acagcatcaccatagt

SEQ ID NO: 744 - DNA, 16 bp, Artificial Sequence
  Description of Artificial Sequence: Synthetic oligonucleotide
aacagcatcaccatag

SEQ ID NO: 745 - DNA, 16 bp, Artificial Sequence
  Description of Artificial Sequence: Synthetic oligonucleotide
caacagcatcaccata

SEQ ID NO: 746 - DNA, 16 bp, Artificial Sequence
  Description of Artificial Sequence: Synthetic oligonucleotide
acaacagcatcaccat

SEQ ID NO: 747 - DNA, 16 bp, Artificial Sequence
  Description of Artificial Sequence: Synthetic oligonucleotide
gctcttgtggcactag

SEQ ID NO: 748 - DNA, 16 bp, Artificial Sequence
  Description of Artificial Sequence: Synthetic oligonucleotide
tgctcttgtggcacta

SEQ ID NO: 749 - DNA, 16 bp, Artificial Sequence
  Description of Artificial Sequence: Synthetic oligonucleotide
gtgctcttgtggcact

SEQ ID NO: 750 - DNA, 16 bp, Artificial Sequence
  Description of Artificial Sequence: Synthetic oligonucleotide
agtgctcttgtggcac

SEQ ID NO: 751 - DNA, 16 bp, Artificial Sequence
  Description of Artificial Sequence: Synthetic oligonucleotide
tagtgctcttgtggca

SEQ ID NO: 752 - DNA, 16 bp, Artificial Sequence
  Description of Artificial Sequence: Synthetic oligonucleotide
atagtgctcttgtggc

SEQ ID NO: 753 - DNA, 16 bp, Artificial Sequence
  Description of Artificial Sequence: Synthetic oligonucleotide
catagtgctcttgtgg

SEQ ID NO: 754 - DNA, 16 bp, Artificial Sequence
  Description of Artificial Sequence: Synthetic oligonucleotide
acatagtgctcttgtg

SEQ ID NO: 755 - DNA, 16 bp, Artificial Sequence
  Description of Artificial Sequence: Synthetic oligonucleotide
aaaactcatctgagat

SEQ ID NO: 756 - DNA, 16 bp, Artificial Sequence
  Description of Artificial Sequence: Synthetic oligonucleotide
gaaaactcatctgaga

SEQ ID NO: 757 - DNA, 16 bp, Artificial Sequence
  Description of Artificial Sequence: Synthetic oligonucleotide
agaaaactcatctgag

SEQ ID NO: 758 - DNA, 16 bp, Artificial Sequence
  Description of Artificial Sequence: Synthetic oligonucleotide
tagaaaactcatctga

SEQ ID NO: 759 - DNA, 16 bp, Artificial Sequence
  Description of Artificial Sequence: Synthetic oligonucleotide
ctagaaaactcatctg

SEQ ID NO: 760 - DNA, 16 bp, Artificial Sequence
  Description of Artificial Sequence: Synthetic oligonucleotide
gctagaaaactcatct

SEQ ID NO: 761 - DNA, 16 bp, Artificial Sequence
  Description of Artificial Sequence: Synthetic oligonucleotide
tgctagaaaactcatc

SEQ ID NO: 762 - DNA, 16 bp, Artificial Sequence
  Description of Artificial Sequence: Synthetic oligonucleotide
ttgctagaaaactcat

SEQ ID NO: 763 - DNA, 16 bp, Artificial Sequence
  Description of Artificial Sequence: Synthetic oligonucleotide
attgctagaaaactca

SEQ ID NO: 764 - DNA, 16 bp, Artificial Sequence
  Description of Artificial Sequence: Synthetic oligonucleotide
cattgctagaaaactc

SEQ ID NO: 765 - DNA, 16 bp, Artificial Sequence
  Description of Artificial Sequence: Synthetic oligonucleotide
acattgctagaaaact

SEQ ID NO: 766 - DNA, 16 bp, Artificial Sequence
  Description of Artificial Sequence: Synthetic oligonucleotide
aacattgctagaaaac

SEQ ID NO: 767 - DNA, 16 bp, Artificial Sequence
  Description of Artificial Sequence: Synthetic oligonucleotide
caacattgctagaaaa

SEQ ID NO: 768 - DNA, 16 bp, Artificial Sequence
  Description of Artificial Sequence: Synthetic oligonucleotide
gcaacattgctagaaa

SEQ ID NO: 769 - DNA, 16 bp, Artificial Sequence
  Description of Artificial Sequence: Synthetic oligonucleotide
tgcaacattgctagaa

SEQ ID NO: 770 - DNA, 16 bp, Artificial Sequence
  Description of Artificial Sequence: Synthetic oligonucleotide
ttgcaacattgctaga

SEQ ID NO: 771 - DNA, 16 bp, Artificial Sequence
  Description of Artificial Sequence: Synthetic oligonucleotide
tttgcaacattgctag

SEQ ID NO: 772 - DNA, 16 bp, Artificial Sequence
  Description of Artificial Sequence: Synthetic oligonucleotide
atttgcaacattgcta

SEQ ID NO: 773 - DNA, 16 bp, Artificial Sequence
  Description of Artificial Sequence: Synthetic oligonucleotide
aatttgcaacattgct

SEQ ID NO: 774 - DNA, 16 bp, Artificial Sequence
  Description of Artificial Sequence: Synthetic oligonucleotide
taatttgcaacattgc

SEQ ID NO: 775 - DNA, 16 bp, Artificial Sequence
  Description of Artificial Sequence: Synthetic oligonucleotide
cagtaccaggtggtcc

SEQ ID NO: 776 - DNA, 16 bp, Artificial Sequence
  Description of Artificial Sequence: Synthetic oligonucleotide
ccagtaccaggtggtc

SEQ ID NO: 777 - DNA, 16 bp, Artificial Sequence
  Description of Artificial Sequence: Synthetic oligonucleotide
accagtaccaggtggt

SEQ ID NO: 778 - DNA, 16 bp, Artificial Sequence
  Description of Artificial Sequence: Synthetic oligonucleotide
taccagtaccaggtgg

SEQ ID NO: 779 - DNA, 16 bp, Artificial Sequence
  Description of Artificial Sequence: Synthetic oligonucleotide
ttaccagtaccaggtg

SEQ ID NO: 780 - DNA, 16 bp, Artificial Sequence
  Description of Artificial Sequence: Synthetic oligonucleotide
cttaccagtaccaggt

SEQ ID NO: 781 - DNA, 16 bp, Artificial Sequence
  Description of Artificial Sequence: Synthetic oligonucleotide
tcttaccagtaccagg

SEQ ID NO: 782 - DNA, 16 bp, Artificial Sequence
  Description of Artificial Sequence: Synthetic oligonucleotide
ctcttaccagtaccag

SEQ ID NO: 783 - DNA, 16 bp, Artificial Sequence
  Description of Artificial Sequence: Synthetic oligonucleotide
actcttaccagtacca

SEQ ID NO: 784 - DNA, 16 bp, Artificial Sequence
  Description of Artificial Sequence: Synthetic oligonucleotide
gactcttaccagtacc

SEQ ID NO: 785 - DNA, 16 bp, Artificial Sequence
  Description of Artificial Sequence: Synthetic oligonucleotide
tgactcttaccagtac

SEQ ID NO: 786 - DNA, 16 bp, Artificial Sequence
  Description of Artificial Sequence: Synthetic oligonucleotide
atgactcttaccagta

SEQ ID NO: 787 - DNA, 16 bp, Artificial Sequence
  Description of Artificial Sequence: Synthetic oligonucleotide
aatgactcttaccagt

SEQ ID NO: 788 - DNA, 16 bp, Artificial Sequence
  Description of Artificial Sequence: Synthetic oligonucleotide
aaatgactcttaccag

SEQ ID NO: 789 - DNA, 16 bp, Artificial Sequence
  Description of Artificial Sequence: Synthetic oligonucleotide
aaaatgactcttacca

SEQ ID NO: 790 - DNA, 16 bp, Artificial Sequence
  Description of Artificial Sequence: Synthetic oligonucleotide
caaaatgactcttacc

SEQ ID NO: 791 - DNA, 16 bp, Artificial Sequence
  Description of Artificial Sequence: Synthetic oligonucleotide
gcaaaatgactcttac

SEQ ID NO: 792 - DNA, 16 bp, Artificial Sequence
  Description of Artificial Sequence: Synthetic oligonucleotide
acactatgcgagcaga

SEQ ID NO: 793 - DNA, 16 bp, Artificial Sequence
  Description of Artificial Sequence: Synthetic oligonucleotide
tacactatgcgagcag

SEQ ID NO: 794 - DNA, 16 bp, Artificial Sequence
  Description of Artificial Sequence: Synthetic oligonucleotide
atacactatgcgagca

SEQ ID NO: 795 - DNA, 16 bp, Artificial Sequence
  Description of Artificial Sequence: Synthetic oligonucleotide
tatacactatgcgagc

SEQ ID NO: 796 - DNA, 16 bp, Artificial Sequence
  Description of Artificial Sequence: Synthetic oligonucleotide
gtatacactatgcgag

SEQ ID NO: 797 - DNA, 16 bp, Artificial Sequence
  Description of Artificial Sequence: Synthetic oligonucleotide
aattcactttgaattt

SEQ ID NO: 798 - DNA, 16 bp, Artificial Sequence
  Description of Artificial Sequence: Synthetic oligonucleotide
gaattcactttgaatt

SEQ ID NO: 799 - DNA, 16 bp, Artificial Sequence
  Description of Artificial Sequence: Synthetic oligonucleotide
tgaattcactttgaat

SEQ ID NO: 800 - DNA, 16 bp, Artificial Sequence
  Description of Artificial Sequence: Synthetic oligonucleotide
ttgaattcactttgaa

SEQ ID NO: 801 - DNA, 16 bp, Artificial Sequence
  Description of Artificial Sequence: Synthetic oligonucleotide
gttgaattcactttga

SEQ ID NO: 802 - DNA, 16 bp, Artificial Sequence
  Description of Artificial Sequence: Synthetic oligonucleotide
tgttgaattcactttg

SEQ ID NO: 803 - DNA, 16 bp, Artificial Sequence
  Description of Artificial Sequence: Synthetic oligonucleotide
cattgacaacactcaa

SEQ ID NO: 804 - DNA, 16 bp, Artificial Sequence
  Description of Artificial Sequence: Synthetic oligonucleotide
gcattgacaacactca

SEQ ID NO: 805 - DNA, 16 bp, Artificial Sequence
  Description of Artificial Sequence: Synthetic oligonucleotide
acatgtctggacctat

SEQ ID NO: 806 - DNA, 16 bp, Artificial Sequence
  Description of Artificial Sequence: Synthetic oligonucleotide
aacatgtctggaccta

SEQ ID NO: 807 - DNA, 16 bp, Artificial Sequence
  Description of Artificial Sequence: Synthetic oligonucleotide
gaacatgtctggacct

SEQ ID NO: 808 - DNA, 16 bp, Artificial Sequence
  Description of Artificial Sequence: Synthetic oligonucleotide
ggaacatgtctggacc

SEQ ID NO: 809 - DNA, 16 bp, Artificial Sequence
  Description of Artificial Sequence: Synthetic oligonucleotide
aggaacatgtctggac

SEQ ID NO: 810 - DNA, 16 bp, Artificial Sequence
  Description of Artificial Sequence: Synthetic oligonucleotide
tttcagcaggacaacg

SEQ ID NO: 811 - DNA, 16 bp, Artificial Sequence
  Description of Artificial Sequence: Synthetic oligonucleotide
atttcagcaggacaac

SEQ ID NO: 812 - DNA, 16 bp, Artificial Sequence
  Description of Artificial Sequence: Synthetic oligonucleotide
aatttcagcaggacaa

SEQ ID NO: 813 - DNA, 16 bp, Artificial Sequence
  Description of Artificial Sequence: Synthetic oligonucleotide
caatttcagcaggaca

SEQ ID NO: 814 - DNA, 16 bp, Artificial Sequence
  Description of Artificial Sequence: Synthetic oligonucleotide
acaatttcagcaggac

SEQ ID NO: 815 - DNA, 16 bp, Artificial Sequence
  Description of Artificial Sequence: Synthetic oligonucleotide
cagatgaaacatcatg

SEQ ID NO: 816 - DNA, 16 bp, Artificial Sequence
  Description of Artificial Sequence: Synthetic oligonucleotide
gcagatgaaacatcat

SEQ ID NO: 817 - DNA, 16 bp, Artificial Sequence
  Description of Artificial Sequence: Synthetic oligonucleotide
tgcagatgaaacatca

SEQ ID NO: 818 - DNA, 16 bp, Artificial Sequence
  Description of Artificial Sequence: Synthetic oligonucleotide
ttgcagatgaaacatc

SEQ ID NO: 819 - DNA, 16 bp, Artificial Sequence
  Description of Artificial Sequence: Synthetic oligonucleotide
attgcagatgaaacat

SEQ ID NO: 820 - DNA, 16 bp, Artificial Sequence
  Description of Artificial Sequence: Synthetic oligonucleotide
cttttctccaagcagg

SEQ ID NO: 821 - DNA, 16 bp, Artificial Sequence
  Description of Artificial Sequence: Synthetic oligonucleotide
gcttttctccaagcag

SEQ ID NO: 822 - DNA, 16 bp, Artificial Sequence
  Description of Artificial Sequence: Synthetic oligonucleotide
agcttttctccaagca

SEQ ID NO: 823 - DNA, 16 bp, Artificial Sequence
  Description of Artificial Sequence: Synthetic oligonucleotide
cagcttttctccaagc

SEQ ID NO: 824 - DNA, 16 bp, Artificial Sequence
  Description of Artificial Sequence: Synthetic oligonucleotide
acagcttttctccaag

SEQ ID NO: 825 - DNA, 16 bp, Artificial Sequence
  Description of Artificial Sequence: Synthetic oligonucleotide
atatgacatagtcata

SEQ ID NO: 826 - DNA, 16 bp, Artificial Sequence
  Description of Artificial Sequence: Synthetic oligonucleotide
aatatgacatagtcat

SEQ ID NO: 827 - DNA, 16 bp, Artificial Sequence
  Description of Artificial Sequence: Synthetic oligonucleotide
gaatatgacatagtca

SEQ ID NO: 828 - DNA, 16 bp, Artificial Sequence
  Description of Artificial Sequence: Synthetic oligonucleotide
tgaatatgacatagtc

SEQ ID NO: 829 - DNA, 16 bp, Artificial Sequence
  Description of Artificial Sequence: Synthetic oligonucleotide
gtgaatatgacatagt

SEQ ID NO: 830 - DNA, 16 bp, Artificial Sequence
  Description of Artificial Sequence: Synthetic oligonucleotide
tatcagacattatgca

SEQ ID NO: 831 - DNA, 16 bp, Artificial Sequence
  Description of Artificial Sequence: Synthetic oligonucleotide
ctatcagacattatgc

SEQ ID NO: 832 - DNA, 16 bp, Artificial Sequence
  Description of Artificial Sequence: Synthetic oligonucleotide
tctatcagacattatg

SEQ ID NO: 833 - DNA, 16 bp, Artificial Sequence
  Description of Artificial Sequence: Synthetic oligonucleotide
ctctatcagacattat

SEQ ID NO: 834 - DNA, 16 bp, Artificial Sequence
  Description of Artificial Sequence: Synthetic oligonucleotide
tctctatcagacatta

SEQ ID NO: 835 - DNA, 16 bp, Artificial Sequence
  Description of Artificial Sequence: Synthetic oligonucleotide
gtgtaggtgcctgtgt

SEQ ID NO: 836 - DNA, 16 bp, Artificial Sequence
  Description of Artificial Sequence: Synthetic oligonucleotide
tgtgtaggtgcctgtg

SEQ ID NO: 837 - DNA, 16 bp, Artificial Sequence
  Description of Artificial Sequence: Synthetic oligonucleotide
gtgtgtaggtgcctgt

SEQ ID NO: 838 - DNA, 16 bp, Artificial Sequence
  Description of Artificial Sequence: Synthetic oligonucleotide
ggtgtgtaggtgcctg

SEQ ID NO: 839 - DNA, 16 bp, Artificial Sequence
  Description of Artificial Sequence: Synthetic oligonucleotide
aggtgtgtaggtgcct

SEQ ID NO: 840 - DNA, 16 bp, Artificial Sequence
  Description of Artificial Sequence: Synthetic oligonucleotide
gaggtgtgtaggtgcc

SEQ ID NO: 841 - DNA, 16 bp, Artificial Sequence
  Description of Artificial Sequence: Synthetic oligonucleotide
tgaggtgtgtaggtgc

SEQ ID NO: 842 - DNA, 16 bp, Artificial Sequence
  Description of Artificial Sequence: Synthetic oligonucleotide
ctgaggtgtgtaggtg

SEQ ID NO: 843 - DNA, 16 bp, Artificial Sequence
  Description of Artificial Sequence: Synthetic oligonucleotide
tcatagagatgagtct

SEQ ID NO: 844 - DNA, 16 bp, Artificial Sequence
  Description of Artificial Sequence: Synthetic oligonucleotide
atcatagagatgagtc

SEQ ID NO: 845 - DNA, 16 bp, Artificial Sequence
  Description of Artificial Sequence: Synthetic oligonucleotide
catcatagagatgagt

SEQ ID NO: 846 - DNA, 16 bp, Artificial Sequence
  Description of Artificial Sequence: Synthetic oligonucleotide
ccatcatagagatgag

SEQ ID NO: 847 - DNA, 16 bp, Artificial Sequence
  Description of Artificial Sequence: Synthetic oligonucleotide
cccatcatagagatga

SEQ ID NO: 848 - DNA, 16 bp, Artificial Sequence
  Description of Artificial Sequence: Synthetic oligonucleotide
acccatcatagagatg

SEQ ID NO: 849 - DNA, 16 bp, Artificial Sequence
  Description of Artificial Sequence: Synthetic oligonucleotide
aacccatcatagagat

SEQ ID NO: 850 - DNA, 16 bp, Artificial Sequence
  Description of Artificial Sequence: Synthetic oligonucleotide
aaacccatcatagaga

SEQ ID NO: 851 - DNA, 16 bp, Artificial Sequence
  Description of Artificial Sequence: Synthetic oligonucleotide
gcttaacaaagcactc

SEQ ID NO: 852 - DNA, 16 bp, Artificial Sequence
  Description of Artificial Sequence: Synthetic oligonucleotide
cgcttaacaaagcact

SEQ ID NO: 853 - DNA, 16 bp, Artificial Sequence
  Description of Artificial Sequence: Synthetic oligonucleotide
cattttctaaactctg

SEQ ID NO: 854 - DNA, 16 bp, Artificial Sequence
  Description of Artificial Sequence: Synthetic oligonucleotide
acattttctaaactct

SEQ ID NO: 855 - DNA, 16 bp, Artificial Sequence
  Description of Artificial Sequence: Synthetic oligonucleotide
cacattttctaaactc

SEQ ID NO: 856 - DNA, 16 bp, Artificial Sequence
  Description of Artificial Sequence: Synthetic oligonucleotide
ccacattttctaaact

SEQ ID NO: 857 - DNA, 16 bp, Artificial Sequence
  Description of Artificial Sequence: Synthetic oligonucleotide
gccacattttctaaac

SEQ ID NO: 858 - DNA, 16 bp, Artificial Sequence
  Description of Artificial Sequence: Synthetic oligonucleotide
agccacattttctaaa

SEQ ID NO: 859 - DNA, 16 bp, Artificial Sequence
  Description of Artificial Sequence: Synthetic oligonucleotide
aagccacattttctaa

SEQ ID NO: 860 - DNA, 16 bp, Artificial Sequence
  Description of Artificial Sequence: Synthetic oligonucleotide
gtccatcaaagtgtcc

SEQ ID NO: 861 - DNA, 16 bp, Artificial Sequence
  Description of Artificial Sequence: Synthetic oligonucleotide
tgtccatcaaagtgtc

SEQ ID NO: 862 - DNA, 16 bp, Artificial Sequence
  Description of Artificial Sequence: Synthetic oligonucleotide
tagcccaaagctcaaa

SEQ ID NO: 863 - DNA, 16 bp, Artificial Sequence
  Description of Artificial Sequence: Synthetic oligonucleotide
ttagcccaaagctcaa

SEQ ID NO: 864 - DNA, 16 bp, Artificial Sequence
  Description of Artificial Sequence: Synthetic oligonucleotide
cttagcccaaagctca

SEQ ID NO: 865 - DNA, 16 bp, Artificial Sequence
  Description of Artificial Sequence: Synthetic oligonucleotide
gcttagcccaaagctc

SEQ ID NO: 866 - DNA, 16 bp, Artificial Sequence
  Description of Artificial Sequence: Synthetic oligonucleotide
cgcttagcccaaagct

SEQ ID NO: 867 - DNA, 16 bp, Artificial Sequence
  Description of Artificial Sequence: Synthetic oligonucleotide
ccaaattattgagtat

SEQ ID NO: 868 - DNA, 16 bp, Artificial Sequence
  Description of Artificial Sequence: Synthetic oligonucleotide
cccaaattattgagta

SEQ ID NO: 869 - DNA, 16 bp, Artificial Sequence
  Description of Artificial Sequence: Synthetic oligonucleotide
acccaaattattgagt

SEQ ID NO: 870 - DNA, 16 bp, Artificial Sequence
  Description of Artificial Sequence: Synthetic oligonucleotide
cacccaaattattgag

SEQ ID NO: 871 - DNA, 16 bp, Artificial Sequence
  Description of Artificial Sequence: Synthetic oligonucleotide
acacccaaattattga

SEQ ID NO: 872 - DNA, 16 bp, Artificial Sequence
  Description of Artificial Sequence: Synthetic oligonucleotide
ttaatgtgactccatt

SEQ ID NO: 873 - DNA, 16 bp, Artificial Sequence
  Description of Artificial Sequence: Synthetic oligonucleotide
attaatgtgactccat

SEQ ID NO: 874 - DNA, 16 bp, Artificial Sequence
  Description of Artificial Sequence: Synthetic oligonucleotide
aattaatgtgactcca

SEQ ID NO: 875 - DNA, 16 bp, Artificial Sequence
  Description of Artificial Sequence: Synthetic oligonucleotide
caattaatgtgactcc

SEQ ID NO: 876 - DNA, 16 bp, Artificial Sequence
  Description of Artificial Sequence: Synthetic oligonucleotide
ccaattaatgtgactc

SEQ ID NO: 877 - DNA, 16 bp, Artificial Sequence
  Description of Artificial Sequence: Synthetic oligonucleotide
tccaattaatgtgact

SEQ ID NO: 878 - DNA, 16 bp, Artificial Sequence
  Description of Artificial Sequence: Synthetic oligonucleotide
ctccaattaatgtgac

SEQ ID NO: 879 - DNA, 16 bp, Artificial Sequence
  Description of Artificial Sequence: Synthetic oligonucleotide
tctccaattaatgtga

SEQ ID NO: 880 - DNA, 16 bp, Artificial Sequence
  Description of Artificial Sequence: Synthetic oligonucleotide
ttctccaattaatgtg

SEQ ID NO: 881 - DNA, 16 bp, Artificial Sequence
  Description of Artificial Sequence: Synthetic oligonucleotide
cgacattcatcattat

SEQ ID NO: 882 - DNA, 16 bp, Artificial Sequence
  Description of Artificial Sequence: Synthetic oligonucleotide
gcgacattcatcatta

SEQ ID NO: 883 - DNA, 16 bp, Artificial Sequence
  Description of Artificial Sequence: Synthetic oligonucleotide
tgcgacattcatcatt

SEQ ID NO: 884 - DNA, 16 bp, Artificial Sequence
  Description of Artificial Sequence: Synthetic oligonucleotide
ttgcgacattcatcat

SEQ ID NO: 885 - DNA, 16 bp, Artificial Sequence
  Description of Artificial Sequence: Synthetic oligonucleotide
tttgcgacattcatca

SEQ ID NO: 886 - DNA, 16 bp, Artificial Sequence
  Description of Artificial Sequence: Synthetic oligonucleotide
cagcattccaagaatg

SEQ ID NO: 887 - DNA, 16 bp, Artificial Sequence
  Description of Artificial Sequence: Synthetic oligonucleotide
tcagcattccaagaat

SEQ ID NO: 888 - DNA, 16 bp, Artificial Sequence
  Description of Artificial Sequence: Synthetic oligonucleotide
caattaaaaatgcttc

SEQ ID NO: 889 - DNA, 16 bp, Artificial Sequence
  Description of Artificial Sequence: Synthetic oligonucleotide
ccaattaaaaatgctt

SEQ ID NO: 890 - DNA, 16 bp, Artificial Sequence
  Description of Artificial Sequence: Synthetic oligonucleotide
tgttgttttctctaat

SEQ ID NO: 891 - DNA, 16 bp, Artificial Sequence
  Description of Artificial Sequence: Synthetic oligonucleotide
ctgttgttttctctaa

SEQ ID NO: 892 - DNA, 16 bp, Artificial Sequence
  Description of Artificial Sequence: Synthetic oligonucleotide
tctgttgttttctcta

SEQ ID NO: 893 - DNA, 16 bp, Artificial Sequence
  Description of Artificial Sequence: Synthetic oligonucleotide
ctctgttgttttctct

SEQ ID NO: 894 - DNA, 16 bp, Artificial Sequence
  Description of Artificial Sequence: Synthetic oligonucleotide
actctgttgttttctc

SEQ ID NO: 895 - DNA, 16 bp, Artificial Sequence
  Description of Artificial Sequence: Synthetic oligonucleotide
aactctgttgttttct

SEQ ID NO: 896 - DNA, 16 bp, Artificial Sequence
  Description of Artificial Sequence: Synthetic oligonucleotide
caactctgttgttttc

SEQ ID NO: 897 - DNA, 16 bp, Artificial Sequence
  Description of Artificial Sequence: Synthetic oligonucleotide
acaactctgttgtttt

SEQ ID NO: 898 - DNA, 16 bp, Artificial Sequence
  Description of Artificial Sequence: Synthetic oligonucleotide
atatttgtgaaaaatt

SEQ ID NO: 899 - DNA, 16 bp, Artificial Sequence
  Description of Artificial Sequence: Synthetic oligonucleotide
aatatttgtgaaaaat

SEQ ID NO: 900 - DNA, 16 bp, Artificial Sequence
  Description of Artificial Sequence: Synthetic oligonucleotide
ccatttgcatagcaaa

SEQ ID NO: 901 - DNA, 16 bp, Artificial Sequence
  Description of Artificial Sequence: Synthetic oligonucleotide
gccatttgcatagcaa

SEQ ID NO: 902 - DNA, 16 bp, Artificial Sequence
  Description of Artificial Sequence: Synthetic oligonucleotide
tctcatagagaacatt

SEQ ID NO: 903 - DNA, 16 bp, Artificial Sequence
  Description of Artificial Sequence: Synthetic oligonucleotide
ttctcatagagaacat

SEQ ID NO: 904 - DNA, 16 bp, Artificial Sequence
  Description of Artificial Sequence: Synthetic oligonucleotide
gttctcatagagaaca

SEQ ID NO: 905 - DNA, 16 bp, Artificial Sequence
  Description of Artificial Sequence: Synthetic oligonucleotide
ggttctcatagagaac

SEQ ID NO: 906 - DNA, 16 bp, Artificial Sequence
  Description of Artificial Sequence: Synthetic oligonucleotide
tggttctcatagagaa

SEQ ID NO: 907 - DNA, 16 bp, Artificial Sequence
  Description of Artificial Sequence: Synthetic oligonucleotide
ttggttctcatagaga

SEQ ID NO: 908 - DNA, 16 bp, Artificial Sequence
  Description of Artificial Sequence: Synthetic oligonucleotide
tttggttctcatagag

SEQ ID NO: 909 - DNA, 16 bp, Artificial Sequence
  Description of Artificial Sequence: Synthetic oligonucleotide
ttttggttctcataga

SEQ ID NO: 910 - DNA, 16 bp, Artificial Sequence
  Description of Artificial Sequence: Synthetic oligonucleotide
tttttggttctcatag

SEQ ID NO: 911 - DNA, 16 bp, Artificial Sequence
  Description of Artificial Sequence: Synthetic oligonucleotide
taagttgtttaacaag

SEQ ID NO: 912 - DNA, 16 bp, Artificial Sequence
  Description of Artificial Sequence: Synthetic oligonucleotide
ctaagttgtttaacaa

SEQ ID NO: 913 - DNA, 16 bp, Artificial Sequence
  Description of Artificial Sequence: Synthetic oligonucleotide
gctaagttgtttaaca

SEQ ID NO: 914 - DNA, 16 bp, Artificial Sequence
  Description of Artificial Sequence: Synthetic oligonucleotide
agctaagttgtttaac

SEQ ID NO: 915 - DNA, 16 bp, Artificial Sequence
  Description of Artificial Sequence: Synthetic oligonucleotide
gagctaagttgtttaa

SEQ ID NO: 916 - DNA, 16 bp, Artificial Sequence
  Description of Artificial Sequence: Synthetic oligonucleotide
caagattagcagaagc

SEQ ID NO: 917 - DNA, 16 bp, Artificial Sequence
  Description of Artificial Sequence: Synthetic oligonucleotide
gcaagattagcagaag

SEQ ID NO: 918 - DNA, 16 bp, Artificial Sequence
  Description of Artificial Sequence: Synthetic oligonucleotide
agcaagattagcagaa

SEQ ID NO: 919 - DNA, 16 bp, Artificial Sequence
  Description of Artificial Sequence: Synthetic oligonucleotide
cagcaagattagcaga

SEQ ID NO: 920 - DNA, 16 bp, Artificial Sequence
  Description of Artificial Sequence: Synthetic oligonucleotide
gcagcaagattagcag

SEQ ID NO: 921 - DNA, 16 bp, Artificial Sequence
  Description of Artificial Sequence: Synthetic oligonucleotide
agcagcaagattagca

SEQ ID NO: 922 - DNA, 16 bp, Artificial Sequence
  Description of Artificial Sequence: Synthetic oligonucleotide
tagcagcaagattagc

SEQ ID NO: 923 - DNA, 16 bp, Artificial Sequence
  Description of Artificial Sequence: Synthetic oligonucleotide
gtagcagcaagattag

SEQ ID NO: 924 - DNA, 16 bp, Artificial Sequence
  Description of Artificial Sequence: Synthetic oligonucleotide
agtagcagcaagatta

SEQ ID NO: 925 - DNA, 16 bp, Artificial Sequence
  Description of Artificial Sequence: Synthetic oligonucleotide
tagtagcagcaagatt

SEQ ID NO: 926 - DNA, 16 bp, Artificial Sequence
  Description of Artificial Sequence: Synthetic oligonucleotide
ttagtagcagcaagat

SEQ ID NO: 927 - DNA, 16 bp, Artificial Sequence
  Description of Artificial Sequence: Synthetic oligonucleotide
tttagtagcagcaaga

SEQ ID NO: 928 - DNA, 16 bp, Artificial Sequence
  Description of Artificial Sequence: Synthetic oligonucleotide
ttttagtagcagcaag

SEQ ID NO: 929 - DNA, 16 bp, Artificial Sequence
  Description of Artificial Sequence: Synthetic oligonucleotide
attttagtagcagcaa

SEQ ID NO: 930 - DNA, 16 bp, Artificial Sequence
  Description of Artificial Sequence: Synthetic oligonucleotide
cattttagtagcagca

SEQ ID NO: 931 - DNA, 16 bp, Artificial Sequence
  Description of Artificial Sequence: Synthetic oligonucleotide
acattttagtagcagc

SEQ ID NO: 932 - DNA, 16 bp, Artificial Sequence
  Description of Artificial Sequence: Synthetic oligonucleotide
gacattttagtagcag

SEQ ID NO: 933 - DNA, 16 bp, Artificial Sequence
  Description of Artificial Sequence: Synthetic oligonucleotide
tttttgattgtccaag

SEQ ID NO: 934 - DNA, 16 bp, Artificial Sequence
  Description of Artificial Sequence: Synthetic oligonucleotide
ctttttgattgtccaa

SEQ ID NO: 935 - DNA, 16 bp, Artificial Sequence
  Description of Artificial Sequence: Synthetic oligonucleotide
tctttttgattgtcca

SEQ ID NO: 936 - DNA, 16 bp, Artificial Sequence
  Description of Artificial Sequence: Synthetic oligonucleotide
ctctttttgattgtcc

SEQ ID NO: 937 - DNA, 16 bp, Artificial Sequence
  Description of Artificial Sequence: Synthetic oligonucleotide
actctttttgattgtc

SEQ ID NO: 938 - DNA, 16 bp, Artificial Sequence
  Description of Artificial Sequence: Synthetic oligonucleotide
aactctttttgattgt

SEQ ID NO: 939 - DNA, 16 bp, Artificial Sequence
  Description of Artificial Sequence: Synthetic oligonucleotide
caactctttttgattg

SEQ ID NO: 940 - DNA, 16 bp, Artificial Sequence
  Description of Artificial Sequence: Synthetic oligonucleotide
tcaactctttttgatt

SEQ ID NO: 941 - DNA, 16 bp, Artificial Sequence
  Description of Artificial Sequence: Synthetic oligonucleotide
ctggtgatgtatgatt

SEQ ID NO: 942 - DNA, 16 bp, Artificial Sequence
  Description of Artificial Sequence: Synthetic oligonucleotide
tctggtgatgtatgat

SEQ ID NO: 943 - DNA, 16 bp, Artificial Sequence
  Description of Artificial Sequence: Synthetic oligonucleotide
atctggtgatgtatga

SEQ ID NO: 944 - DNA, 16 bp, Artificial Sequence
  Description of Artificial Sequence: Synthetic oligonucleotide
catctggtgatgtatg

SEQ ID NO: 945 - DNA, 16 bp, Artificial Sequence
  Description of Artificial Sequence: Synthetic oligonucleotide
acatctggtgatgtat

SEQ ID NO: 946 - DNA, 16 bp, Artificial Sequence
  Description of Artificial Sequence: Synthetic oligonucleotide
aacatctggtgatgta

SEQ ID NO: 947 - DNA, 16 bp, Artificial Sequence
  Description of Artificial Sequence: Synthetic oligonucleotide
caacatctggtgatgt

SEQ ID NO: 948 - DNA, 16 bp, Artificial Sequence
  Description of Artificial Sequence: Synthetic oligonucleotide
tcaacatctggtgatg

SEQ ID NO: 949 - DNA, 16 bp, Artificial Sequence
  Description of Artificial Sequence: Synthetic oligonucleotide
atcaacatctggtgat

SEQ ID NO: 950 - DNA, 16 bp, Artificial Sequence
  Description of Artificial Sequence: Synthetic oligonucleotide
aggcggtcaatttctt

SEQ ID NO: 951 - DNA, 16 bp, Artificial Sequence
  Description of Artificial Sequence: Synthetic oligonucleotide
gaggcggtcaatttct

SEQ ID NO: 952 - DNA, 16 bp, Artificial Sequence
  Description of Artificial Sequence: Synthetic oligonucleotide
tgaggcggtcaatttc

SEQ ID NO: 953 - DNA, 16 bp, Artificial Sequence
  Description of Artificial Sequence: Synthetic oligonucleotide
ttgaggcggtcaattt

SEQ ID NO: 954 - DNA, 16 bp, Artificial Sequence
  Description of Artificial Sequence: Synthetic oligonucleotide
attgaggcggtcaatt

SEQ ID NO: 955 - DNA, 16 bp, Artificial Sequence
  Description of Artificial Sequence: Synthetic oligonucleotide
cattgaggcggtcaat

SEQ ID NO: 956 - DNA, 16 bp, Artificial Sequence
  Description of Artificial Sequence: Synthetic oligonucleotide
tcattgaggcggtcaa

SEQ ID NO: 957 - DNA, 16 bp, Artificial Sequence
  Description of Artificial Sequence: Synthetic oligonucleotide
ctcattgaggcggtca

SEQ ID NO: 958 - DNA, 16 bp, Artificial Sequence
  Description of Artificial Sequence: Synthetic oligonucleotide
cctcattgaggcggtc

SEQ ID NO: 959 - DNA, 16 bp, Artificial Sequence
  Description of Artificial Sequence: Synthetic oligonucleotide
acctcattgaggcggt

SEQ ID NO: 960 - DNA, 16 bp, Artificial Sequence
  Description of Artificial Sequence: Synthetic oligonucleotide
tgtaatgtaatttgac

SEQ ID NO: 961 - DNA, 16 bp, Artificial Sequence
  Description of Artificial Sequence: Synthetic oligonucleotide
gtgtaatgtaatttga

SEQ ID NO: 962 - DNA, 16 bp, Artificial Sequence
  Description of Artificial Sequence: Synthetic oligonucleotide
tgtgtaatgtaatttg

SEQ ID NO: 963 - DNA, 16 bp, Artificial Sequence
  Description of Artificial Sequence: Synthetic oligonucleotide
atgtgtaatgtaattt

SEQ ID NO: 964 - DNA, 16 bp, Artificial Sequence
  Description of Artificial Sequence: Synthetic oligonucleotide
tatgtgtaatgtaatt

SEQ ID NO: 965 - DNA, 16 bp, Artificial Sequence
  Description of Artificial Sequence: Synthetic oligonucleotide
ttatgtgtaatgtaat

SEQ ID NO: 966 - DNA, 16 bp, Artificial Sequence
  Description of Artificial Sequence: Synthetic oligonucleotide
tttatgtgtaatgtaa

SEQ ID NO: 967 - DNA, 16 bp, Artificial Sequence
  Description of Artificial Sequence: Synthetic oligonucleotide
gtttatgtgtaatgta

SEQ ID NO: 968 - DNA, 16 bp, Artificial Sequence
  Description of Artificial Sequence: Synthetic oligonucleotide
cgtttatgtgtaatgt

SEQ ID NO: 969 - DNA, 16 bp, Artificial Sequence
  Description of Artificial Sequence: Synthetic oligonucleotide
gggagtgaggcttgta

SEQ ID NO: 970 - DNA, 16 bp, Artificial Sequence
  Description of Artificial Sequence: Synthetic oligonucleotide
agggagtgaggcttgt

SEQ ID NO: 971 - DNA, 16 bp, Artificial Sequence
  Description of Artificial Sequence: Synthetic oligonucleotide
aagggagtgaggcttg

SEQ ID NO: 972 - DNA, 16 bp, Artificial Sequence
  Description of Artificial Sequence: Synthetic oligonucleotide
aaagggagtgaggctt

SEQ ID NO: 973 - DNA, 16 bp, Artificial Sequence
  Description of Artificial Sequence: Synthetic oligonucleotide
gaaagggagtgaggct

SEQ ID NO: 974 - DNA, 16 bp, Artificial Sequence
  Description of Artificial Sequence: Synthetic oligonucleotide
cgaaagggagtgaggc

SEQ ID NO: 975 - DNA, 16 bp, Artificial Sequence
  Description of Artificial Sequence: Synthetic oligonucleotide
ccgaaagggagtgagg

SEQ ID NO: 976 - DNA, 16 bp, Artificial Sequence
  Description of Artificial Sequence: Synthetic oligonucleotide
tccgaaagggagtgag

SEQ ID NO: 977 - DNA, 16 bp, Artificial Sequence
  Description of Artificial Sequence: Synthetic oligonucleotide
atccgaaagggagtga

SEQ ID NO: 978 - DNA, 16 bp, Artificial Sequence
  Description of Artificial Sequence: Synthetic oligonucleotide
catccgaaagggagtg

SEQ ID NO: 979 - DNA, 16 bp, Artificial Sequence
  Description of Artificial Sequence: Synthetic oligonucleotide
ccatccgaaagggagt

SEQ ID NO: 980 - DNA, 16 bp, Artificial Sequence
  Description of Artificial Sequence: Synthetic oligonucleotide
gccatccgaaagggag

SEQ ID NO: 981 - DNA, 16 bp, Artificial Sequence
  Description of Artificial Sequence: Synthetic oligonucleotide
agccatccgaaaggga

SEQ ID NO: 982 - DNA, 16 bp, Artificial Sequence
  Description of Artificial Sequence: Synthetic oligonucleotide
aagccatccgaaaggg

SEQ ID NO: 983 - DNA, 16 bp, Artificial Sequence
  Description of Artificial Sequence: Synthetic oligonucleotide
tgaaaaacagcaagaa

SEQ ID NO: 984 - DNA, 16 bp, Artificial Sequence
  Description of Artificial Sequence: Synthetic oligonucleotide
tagtagtcgtcgtcgg

SEQ ID NO: 985 - DNA, 16 bp, Artificial Sequence
  Description of Artificial Sequence: Synthetic oligonucleotide
ctagtagtcgtcgtcg

SEQ ID NO: 986 - DNA, 16 bp, Artificial Sequence
  Description of Artificial Sequence: Synthetic oligonucleotide
gctagtagtcgtcgtc

SEQ ID NO: 987 - DNA, 16 bp, Artificial Sequence
  Description of Artificial Sequence: Synthetic oligonucleotide
cgctagtagtcgtcgt

SEQ ID NO: 988 - DNA, 16 bp, Artificial Sequence
  Description of Artificial Sequence: Synthetic oligonucleotide
acgctagtagtcgtcg

SEQ ID NO: 989 - DNA, 16 bp, Artificial Sequence
  Description of Artificial Sequence: Synthetic oligonucleotide
cacgctagtagtcgtc

SEQ ID NO: 990 - DNA, 16 bp, Artificial Sequence
  Description of Artificial Sequence: Synthetic oligonucleotide
gcacgctagtagtcgt

SEQ ID NO: 991 - DNA, 16 bp, Artificial Sequence
  Description of Artificial Sequence: Synthetic oligonucleotide
ggcacgctagtagtcg

SEQ ID NO: 992 - DNA, 16 bp, Artificial Sequence
  Description of Artificial Sequence: Synthetic oligonucleotide
aggcacgctagtagtc

SEQ ID NO: 993 - DNA, 16 bp, Artificial Sequence
  Description of Artificial Sequence: Synthetic oligonucleotide
aaggcacgctagtagt

SEQ ID NO: 994 - DNA, 16 bp, Artificial Sequence
  Description of Artificial Sequence: Synthetic oligonucleotide
aaaggcacgctagtag

SEQ ID NO: 995 - DNA, 16 bp, Artificial Sequence
  Description of Artificial Sequence: Synthetic oligonucleotide
caaaggcacgctagta

SEQ ID NO: 996 - DNA, 16 bp, Artificial Sequence
  Description of Artificial Sequence: Synthetic oligonucleotide
acaaaggcacgctagt

SEQ ID NO: 997 - DNA, 16 bp, Artificial Sequence
  Description of Artificial Sequence: Synthetic oligonucleotide
tacaaaggcacgctag

SEQ ID NO: 998 - DNA, 16 bp, Artificial Sequence
  Description of Artificial Sequence: Synthetic oligonucleotide
ttacaaaggcacgcta

SEQ ID NO: 999 - DNA, 16 bp, Artificial Sequence
  Description of Artificial Sequence: Synthetic oligonucleotide
cttacaaaggcacgct

SEQ ID NO: 1000 - DNA, 16 bp, Artificial Sequence
  Description of Artificial Sequence: Synthetic oligonucleotide
gcttacaaaggcacgc

SEQ ID NO: 1001 - DNA, 16 bp, Artificial Sequence
  Description of Artificial Sequence: Synthetic oligonucleotide
tgcttacaaaggcacg

SEQ ID NO: 1002 - DNA, 16 bp, Artificial Sequence
  Description of Artificial Sequence: Synthetic oligonucleotide
gtgcttacaaaggcac

SEQ ID NO: 1003 - DNA, 16 bp, Artificial Sequence
  Description of Artificial Sequence: Synthetic oligonucleotide
tgtgcttacaaaggca

SEQ ID NO: 1004 - DNA, 16 bp, Artificial Sequence
  Description of Artificial Sequence: Synthetic oligonucleotide
ttgtgcttacaaaggc

SEQ ID NO: 1005 - DNA, 16 bp, Artificial Sequence
  Description of Artificial Sequence: Synthetic oligonucleotide
cttgtgcttacaaagg

SEQ ID NO: 1006 - DNA, 16 bp, Artificial Sequence
  Description of Artificial Sequence: Synthetic oligonucleotide
cataagttcgtactca

SEQ ID NO: 1007 - DNA, 16 bp, Artificial Sequence
  Description of Artificial Sequence: Synthetic oligonucleotide
acataagttcgtactc

SEQ ID NO: 1008 - DNA, 16 bp, Artificial Sequence
  Description of Artificial Sequence: Synthetic oligonucleotide
tacataagttcgtact

SEQ ID NO: 1009 - DNA, 16 bp, Artificial Sequence
  Description of Artificial Sequence: Synthetic oligonucleotide
gtacataagttcgtac

SEQ ID NO: 1010 - DNA, 16 bp, Artificial Sequence
  Description of Artificial Sequence: Synthetic oligonucleotide
agtacataagttcgta

SEQ ID NO: 1011 - DNA, 16 bp, Artificial Sequence
  Description of Artificial Sequence: Synthetic oligonucleotide
gagtacataagttcgt

SEQ ID NO: 1012 - DNA, 16 bp, Artificial Sequence
  Description of Artificial Sequence: Synthetic oligonucleotide
tgagtacataagttcg

SEQ ID NO: 1013 - DNA, 16 bp, Artificial Sequence
  Description of Artificial Sequence: Synthetic oligonucleotide
atgagtacataagttc

SEQ ID NO: 1014 - DNA, 16 bp, Artificial Sequence
  Description of Artificial Sequence: Synthetic oligonucleotide
aatgagtacataagtt

SEQ ID NO: 1015 - DNA, 16 bp, Artificial Sequence
  Description of Artificial Sequence: Synthetic oligonucleotide
gaatgagtacataagt

SEQ ID NO: 1016 - DNA, 16 bp, Artificial Sequence
  Description of Artificial Sequence: Synthetic oligonucleotide
cgaatgagtacataag

SEQ ID NO: 1017 - DNA, 16 bp, Artificial Sequence
  Description of Artificial Sequence: Synthetic oligonucleotide
acgaatgagtacataa

SEQ ID NO: 1018 - DNA, 16 bp, Artificial Sequence
  Description of Artificial Sequence: Synthetic oligonucleotide
aacgaatgagtacata

SEQ ID NO: 1019 - DNA, 16 bp, Artificial Sequence
  Description of Artificial Sequence: Synthetic oligonucleotide
aaacgaatgagtacat

SEQ ID NO: 1020 - DNA, 16 bp, Artificial Sequence
  Description of Artificial Sequence: Synthetic oligonucleotide
gaaacgaatgagtaca

SEQ ID NO: 1021 - DNA, 16 bp, Artificial Sequence
  Description of Artificial Sequence: Synthetic oligonucleotide
cgaaacgaatgagtac

SEQ ID NO: 1022 - DNA, 16 bp, Artificial Sequence
  Description of Artificial Sequence: Synthetic oligonucleotide
ccgaaacgaatgagta

SEQ ID NO: 1023 - DNA, 16 bp, Artificial Sequence
  Description of Artificial Sequence: Synthetic oligonucleotide
tccgaaacgaatgagt

SEQ ID NO: 1024 - DNA, 16 bp, Artificial Sequence
  Description of Artificial Sequence: Synthetic oligonucleotide
ttccgaaacgaatgag

SEQ ID NO: 1025 - DNA, 16 bp, Artificial Sequence
  Description of Artificial Sequence: Synthetic oligonucleotide
cttccgaaacgaatga

SEQ ID NO: 1026 - DNA, 16 bp, Artificial Sequence
  Description of Artificial Sequence: Synthetic oligonucleotide
tcttccgaaacgaatg

SEQ ID NO: 1027 - DNA, 16 bp, Artificial Sequence
  Description of Artificial Sequence: Synthetic oligonucleotide
ctattaacgtacctgt

SEQ ID NO: 1028 - DNA, 16 bp, Artificial Sequence
  Description of Artificial Sequence: Synthetic oligonucleotide
actattaacgtacctg

SEQ ID NO: 1029 - DNA, 16 bp, Artificial Sequence
  Description of Artificial Sequence: Synthetic oligonucleotide
aactattaacgtacct

SEQ ID NO: 1030 - DNA, 16 bp, Artificial Sequence
  Description of Artificial Sequence: Synthetic oligonucleotide
taactattaacgtacc

SEQ ID NO: 1031 - DNA, 16 bp, Artificial Sequence
  Description of Artificial Sequence: Synthetic oligonucleotide
ttaactattaacgtac

SEQ ID NO: 1032 - DNA, 16 bp, Artificial Sequence
  Description of Artificial Sequence: Synthetic oligonucleotide
attaactattaacgta

SEQ ID NO: 1033 - DNA, 16 bp, Artificial Sequence
  Description of Artificial Sequence: Synthetic oligonucleotide
tattaactattaacgt

SEQ ID NO: 1034 - DNA, 16 bp, Artificial Sequence
  Description of Artificial Sequence: Synthetic oligonucleotide
ctattaactattaacg

SEQ ID NO: 1035 - DNA, 16 bp, Artificial Sequence
  Description of Artificial Sequence: Synthetic oligonucleotide
gctattaactattaac

SEQ ID NO: 1036 - DNA, 16 bp, Artificial Sequence
  Description of Artificial Sequence: Synthetic oligonucleotide
cgctattaactattaa

SEQ ID NO: 1037 - DNA, 16 bp, Artificial Sequence
  Description of Artificial Sequence: Synthetic oligonucleotide
acgctattaactatta

SEQ ID NO: 1038 - DNA, 16 bp, Artificial Sequence
  Description of Artificial Sequence: Synthetic oligonucleotide
tacgctattaactatt

SEQ ID NO: 1039 - DNA, 16 bp, Artificial Sequence
  Description of Artificial Sequence: Synthetic oligonucleotide
gtacgctattaactat

SEQ ID NO: 1040 - DNA, 16 bp, Artificial Sequence
  Description of Artificial Sequence: Synthetic oligonucleotide
agtacgctattaacta

SEQ ID NO: 1041 - DNA, 16 bp, Artificial Sequence
  Description of Artificial Sequence: Synthetic oligonucleotide
aagtacgctattaact

SEQ ID NO: 1042 - DNA, 16 bp, Artificial Sequence
  Description of Artificial Sequence: Synthetic oligonucleotide
gaagtacgctattaac

SEQ ID NO: 1043 - DNA, 16 bp, Artificial Sequence
  Description of Artificial Sequence: Synthetic oligonucleotide
agaagtacgctattaa

SEQ ID NO: 1044 - DNA, 16 bp, Artificial Sequence
  Description of Artificial Sequence: Synthetic oligonucleotide
aagaagtacgctatta

SEQ ID NO: 1045 - DNA, 16 bp, Artificial Sequence
  Description of Artificial Sequence: Synthetic oligonucleotide
aaagaagtacgctatt

SEQ ID NO: 1046 - DNA, 16 bp, Artificial Sequence
  Description of Artificial Sequence: Synthetic oligonucleotide
aaaagaagtacgctat

SEQ ID NO: 1047 - DNA, 16 bp, Artificial Sequence
  Description of Artificial Sequence: Synthetic oligonucleotide
aaaaagaagtacgcta

SEQ ID NO: 1048 - DNA, 16 bp, Artificial Sequence
  Description of Artificial Sequence: Synthetic oligonucleotide
gaaaaagaagtacgct

SEQ ID NO: 1049 - DNA, 16 bp, Artificial Sequence
  Description of Artificial Sequence: Synthetic oligonucleotide
agaaaaagaagtacgc

SEQ ID NO: 1050 - DNA, 16 bp, Artificial Sequence
  Description of Artificial Sequence: Synthetic oligonucleotide
aagaaaaagaagtacg

SEQ ID NO: 1051 - DNA, 16 bp, Artificial Sequence
  Description of Artificial Sequence: Synthetic oligonucleotide
caagaaaaagaagtac

SEQ ID NO: 1052 - DNA, 16 bp, Artificial Sequence
  Description of Artificial Sequence: Synthetic oligonucleotide
gcaagaaaaagaagta

SEQ ID NO: 1053 - DNA, 16 bp, Artificial Sequence
  Description of Artificial Sequence: Synthetic oligonucleotide
agcaagaaaaagaagt

SEQ ID NO: 1054 - DNA, 16 bp, Artificial Sequence
  Description of Artificial Sequence: Synthetic oligonucleotide
aagcaagaaaaagaag

SEQ ID NO: 1055 - DNA, 16 bp, Artificial Sequence
  Description of Artificial Sequence: Synthetic oligonucleotide
aaagcaagaaaaagaa

SEQ ID NO: 1056 - DNA, 16 bp, Artificial Sequence
  Description of Artificial Sequence: Synthetic oligonucleotide
gaaagcaagaaaaaga

SEQ ID NO: 1057 - DNA, 16 bp, Artificial Sequence
  Description of Artificial Sequence: Synthetic oligonucleotide
cgaaagcaagaaaaag

SEQ ID NO: 1058 - DNA, 16 bp, Artificial Sequence
  Description of Artificial Sequence: Synthetic oligonucleotide
acgaaagcaagaaaaa

SEQ ID NO: 1059 - DNA, 16 bp, Artificial Sequence
  Description of Artificial Sequence: Synthetic oligonucleotide
cacgaaagcaagaaaa

SEQ ID NO: 1060 - DNA, 16 bp, Artificial Sequence
  Description of Artificial Sequence: Synthetic oligonucleotide
ccacgaaagcaagaaa

SEQ ID NO: 1061 - DNA, 16 bp, Artificial Sequence
  Description of Artificial Sequence: Synthetic oligonucleotide
accacgaaagcaagaa

SEQ ID NO: 1062 - DNA, 16 bp, Artificial Sequence
  Description of Artificial Sequence: Synthetic oligonucleotide
taccacgaaagcaaga

SEQ ID NO: 1063 - DNA, 16 bp, Artificial Sequence
  Description of Artificial Sequence: Synthetic oligonucleotide
ataccacgaaagcaag

SEQ ID NO: 1064 - DNA, 16 bp, Artificial Sequence
  Description of Artificial Sequence: Synthetic oligonucleotide
aataccacgaaagcaa

SEQ ID NO: 1065 - DNA, 16 bp, Artificial Sequence
  Description of Artificial Sequence: Synthetic oligonucleotide
gaataccacgaaagca

SEQ ID NO: 1066 - DNA, 16 bp, Artificial Sequence
  Description of Artificial Sequence: Synthetic oligonucleotide
agaataccacgaaagc

SEQ ID NO: 1067 - DNA, 16 bp, Artificial Sequence
  Description of Artificial Sequence: Synthetic oligonucleotide
aagaataccacgaaag

SEQ ID NO: 1068 - DNA, 16 bp, Artificial Sequence
  Description of Artificial Sequence: Synthetic oligonucleotide
caagaataccacgaaa

SEQ ID NO: 1069 - DNA, 16 bp, Artificial Sequence
  Description of Artificial Sequence: Synthetic oligonucleotide
gcaagaataccacgaa

SEQ ID NO: 1070 - DNA, 16 bp, Artificial Sequence
  Description of Artificial Sequence: Synthetic oligonucleotide
agcaagaataccacga

SEQ ID NO: 1071 - DNA, 16 bp, Artificial Sequence
  Description of Artificial Sequence: Synthetic oligonucleotide
tagcaagaataccacg

SEQ ID NO: 1072 - DNA, 16 bp, Artificial Sequence
  Description of Artificial Sequence: Synthetic oligonucleotide
ctagcaagaataccac

SEQ ID NO: 1073 - DNA, 16 bp, Artificial Sequence
  Description of Artificial Sequence: Synthetic oligonucleotide
actagcaagaatacca

SEQ ID NO: 1074 - DNA, 16 bp, Artificial Sequence
  Description of Artificial Sequence: Synthetic oligonucleotide
taaggatggctagtgt

SEQ ID NO: 1075 - DNA, 16 bp, Artificial Sequence
  Description of Artificial Sequence: Synthetic oligonucleotide
gtaaggatggctagtg

SEQ ID NO: 1076 - DNA, 16 bp, Artificial Sequence
  Description of Artificial Sequence: Synthetic oligonucleotide
agtaaggatggctagt

SEQ ID NO: 1077 - DNA, 16 bp, Artificial Sequence
  Description of Artificial Sequence: Synthetic oligonucleotide
cagtaaggatggctag

SEQ ID NO: 1078 - DNA, 16 bp, Artificial Sequence
  Description of Artificial Sequence: Synthetic oligonucleotide
gcagtaaggatggcta

SEQ ID NO: 1079 - DNA, 16 bp, Artificial Sequence
  Description of Artificial Sequence: Synthetic oligonucleotide
cgcagtaaggatggct

SEQ ID NO: 1080 - DNA, 16 bp, Artificial Sequence
  Description of Artificial Sequence: Synthetic oligonucleotide
gcgcagtaaggatggc

SEQ ID NO: 1081 - DNA, 16 bp, Artificial Sequence
  Description of Artificial Sequence: Synthetic oligonucleotide
agcgcagtaaggatgg

SEQ ID NO: 1082 - DNA, 16 bp, Artificial Sequence
  Description of Artificial Sequence: Synthetic oligonucleotide
aagcgcagtaaggatg

SEQ ID NO: 1083 - DNA, 16 bp, Artificial Sequence
  Description of Artificial Sequence: Synthetic oligonucleotide
gaagcgcagtaaggat

SEQ ID NO: 1084 - DNA, 16 bp, Artificial Sequence
  Description of Artificial Sequence: Synthetic oligonucleotide
cgaagcgcagtaagga

SEQ ID NO: 1085 - DNA, 16 bp, Artificial Sequence
  Description of Artificial Sequence: Synthetic oligonucleotide
tcgaagcgcagtaagg

SEQ ID NO: 1086 - DNA, 16 bp, Artificial Sequence
  Description of Artificial Sequence: Synthetic oligonucleotide
atcgaagcgcagtaag

SEQ ID NO: 1087 - DNA, 16 bp, Artificial Sequence
  Description of Artificial Sequence: Synthetic oligonucleotide
aatcgaagcgcagtaa

SEQ ID NO: 1088 - DNA, 16 bp, Artificial Sequence
  Description of Artificial Sequence: Synthetic oligonucleotide
caatcgaagcgcagta

SEQ ID NO: 1089 - DNA, 16 bp, Artificial Sequence
  Description of Artificial Sequence: Synthetic oligonucleotide
acaatcgaagcgcagt

SEQ ID NO: 1090 - DNA, 16 bp, Artificial Sequence
  Description of Artificial Sequence: Synthetic oligonucleotide
cacaatcgaagcgcag

SEQ ID NO: 1091 - DNA, 16 bp, Artificial Sequence
  Description of Artificial Sequence: Synthetic oligonucleotide
acacaatcgaagcgca

SEQ ID NO: 1092 - DNA, 16 bp, Artificial Sequence
  Description of Artificial Sequence: Synthetic oligonucleotide
cacacaatcgaagcgc

SEQ ID NO: 1093 - DNA, 16 bp, Artificial Sequence
  Description of Artificial Sequence: Synthetic oligonucleotide
gcacacaatcgaagcg

SEQ ID NO: 1094 - DNA, 16 bp, Artificial Sequence
  Description of Artificial Sequence: Synthetic oligonucleotide
cgcacacaatcgaagc

SEQ ID NO: 1095 - DNA, 16 bp, Artificial Sequence
  Description of Artificial Sequence: Synthetic oligonucleotide
acgcacacaatcgaag

SEQ ID NO: 1096 - DNA, 16 bp, Artificial Sequence
  Description of Artificial Sequence: Synthetic oligonucleotide
tacgcacacaatcgaa

SEQ ID NO: 1097 - DNA, 16 bp, Artificial Sequence
  Description of Artificial Sequence: Synthetic oligonucleotide
gtacgcacacaatcga

SEQ ID NO: 1098 - DNA, 16 bp, Artificial Sequence
  Description of Artificial Sequence: Synthetic oligonucleotide
agtacgcacacaatcg

SEQ ID NO: 1099 - DNA, 16 bp, Artificial Sequence
  Description of Artificial Sequence: Synthetic oligonucleotide
cagtacgcacacaatc

SEQ ID NO: 1100 - DNA, 16 bp, Artificial Sequence
  Description of Artificial Sequence: Synthetic oligonucleotide
gcagtacgcacacaat

SEQ ID NO: 1101 - DNA, 16 bp, Artificial Sequence
  Description of Artificial Sequence: Synthetic oligonucleotide
agcagtacgcacacaa

SEQ ID NO: 1102 - DNA, 16 bp, Artificial Sequence
  Description of Artificial Sequence: Synthetic oligonucleotide
cagcagtacgcacaca

SEQ ID NO: 1103 - DNA, 16 bp, Artificial Sequence
  Description of Artificial Sequence: Synthetic oligonucleotide
gcagcagtacgcacac

SEQ ID NO: 1104 - DNA, 16 bp, Artificial Sequence
  Description of Artificial Sequence: Synthetic oligonucleotide
tgcagcagtacgcaca

SEQ ID NO: 1105 - DNA, 16 bp, Artificial Sequence
  Description of Artificial Sequence: Synthetic oligonucleotide
ttgcagcagtacgcac

SEQ ID NO: 1106 - DNA, 16 bp, Artificial Sequence
  Description of Artificial Sequence: Synthetic oligonucleotide
attgcagcagtacgca

SEQ ID NO: 1107 - DNA, 16 bp, Artificial Sequence
  Description of Artificial Sequence: Synthetic oligonucleotide
tattgcagcagtacgc

SEQ ID NO: 1108 - DNA, 16 bp, Artificial Sequence
  Description of Artificial Sequence: Synthetic oligonucleotide
atattgcagcagtacg

SEQ ID NO: 1109 - DNA, 16 bp, Artificial Sequence
  Description of Artificial Sequence: Synthetic oligonucleotide
aatattgcagcagtac

SEQ ID NO: 1110 - DNA, 16 bp, Artificial Sequence
  Description of Artificial Sequence: Synthetic oligonucleotide
caatattgcagcagta

SEQ ID NO: 1111 - DNA, 16 bp, Artificial Sequence
  Description of Artificial Sequence: Synthetic oligonucleotide
acaatattgcagcagt

SEQ ID NO: 1112 - DNA, 16 bp, Artificial Sequence
  Description of Artificial Sequence: Synthetic oligonucleotide
aacaatattgcagcag

SEQ ID NO: 1113 - DNA, 16 bp, Artificial Sequence
  Description of Artificial Sequence: Synthetic oligonucleotide
taacaatattgcagca

SEQ ID NO: 1114 - DNA, 16 bp, Artificial Sequence
  Description of Artificial Sequence: Synthetic oligonucleotide
ttaacaatattgcagc

SEQ ID NO: 1115 - DNA, 16 bp, Artificial Sequence
  Description of Artificial Sequence: Synthetic oligonucleotide
gttaacaatattgcag

SEQ ID NO: 1116 - DNA, 16 bp, Artificial Sequence
  Description of Artificial Sequence: Synthetic oligonucleotide
cgttaacaatattgca

SEQ ID NO: 1117 - DNA, 16 bp, Artificial Sequence
  Description of Artificial Sequence: Synthetic oligonucleotide
acgttaacaatattgc

SEQ ID NO: 1118 - DNA, 16 bp, Artificial Sequence
  Description of Artificial Sequence: Synthetic oligonucleotide
cacgttaacaatattg

SEQ ID NO: 1119 - DNA, 16 bp, Artificial Sequence
  Description of Artificial Sequence: Synthetic oligonucleotide
tcacgttaacaatatt

SEQ ID NO: 1120 - DNA, 16 bp, Artificial Sequence
  Description of Artificial Sequence: Synthetic oligonucleotide
ctcacgttaacaatat

SEQ ID NO: 1121 - DNA, 16 bp, Artificial Sequence
  Description of Artificial Sequence: Synthetic oligonucleotide
actcacgttaacaata

SEQ ID NO: 1122 - DNA, 16 bp, Artificial Sequence
  Description of Artificial Sequence: Synthetic oligonucleotide
tcagatttttaacacg

SEQ ID NO: 1123 - DNA, 16 bp, Artificial Sequence
  Description of Artificial Sequence: Synthetic oligonucleotide
ttcagatttttaacac

SEQ ID NO: 1124 - DNA, 16 bp, Artificial Sequence
  Description of Artificial Sequence: Synthetic oligonucleotide
agaagatcaggaactc

SEQ ID NO: 1125 - DNA, 16 bp, Artificial Sequence
  Description of Artificial Sequence: Synthetic oligonucleotide
cagaagatcaggaact

SEQ ID NO: 1126 - DNA, 16 bp, Artificial Sequence
  Description of Artificial Sequence: Synthetic oligonucleotide
ccagaagatcaggaac

SEQ ID NO: 1127 - DNA, 16 bp, Artificial Sequence
  Description of Artificial Sequence: Synthetic oligonucleotide
accagaagatcaggaa

SEQ ID NO: 1128 - DNA, 16 bp, Artificial Sequence
  Description of Artificial Sequence: Synthetic oligonucleotide
gaccagaagatcagga

SEQ ID NO: 1129 - DNA, 16 bp, Artificial Sequence
  Description of Artificial Sequence: Synthetic oligonucleotide
agaccagaagatcagg

SEQ ID NO: 1130 - DNA, 16 bp, Artificial Sequence
  Description of Artificial Sequence: Synthetic oligonucleotide
tagaccagaagatcag

SEQ ID NO: 1131 - DNA, 16 bp, Artificial Sequence
  Description of Artificial Sequence: Synthetic oligonucleotide
ttagaccagaagatca

SEQ ID NO: 1132 - DNA, 16 bp, Artificial Sequence
  Description of Artificial Sequence: Synthetic oligonucleotide
tttagaccagaagatc

SEQ ID NO: 1133 - DNA, 16 bp, Artificial Sequence
  Description of Artificial Sequence: Synthetic oligonucleotide
gtttagaccagaagat

SEQ ID NO: 1134 - DNA, 16 bp, Artificial Sequence
  Description of Artificial Sequence: Synthetic oligonucleotide
cgtttagaccagaaga

SEQ ID NO: 1135 - DNA, 16 bp, Artificial Sequence
  Description of Artificial Sequence: Synthetic oligonucleotide
tcgtttagaccagaag

SEQ ID NO: 1136 - DNA, 16 bp, Artificial Sequence
  Description of Artificial Sequence: Synthetic oligonucleotide
ttcgtttagaccagaa

SEQ ID NO: 1137 - DNA, 16 bp, Artificial Sequence
  Description of Artificial Sequence: Synthetic oligonucleotide
gttcgtttagaccaga

SEQ ID NO: 1138 - DNA, 16 bp, Artificial Sequence
  Description of Artificial Sequence: Synthetic oligonucleotide
agttcgtttagaccag

SEQ ID NO: 1139 - DNA, 16 bp, Artificial Sequence
  Description of Artificial Sequence: Synthetic oligonucleotide
tagttcgtttagacca

SEQ ID NO: 1140 - DNA, 16 bp, Artificial Sequence
  Description of Artificial Sequence: Synthetic oligonucleotide
ttagttcgtttagacc

SEQ ID NO: 1141 - DNA, 16 bp, Artificial Sequence
  Description of Artificial Sequence: Synthetic oligonucleotide
aaagttccaaacagaa

SEQ ID NO: 1142 - DNA, 16 bp, Artificial Sequence
  Description of Artificial Sequence: Synthetic oligonucleotide
taaagttccaaacaga

SEQ ID NO: 1143 - DNA, 16 bp, Artificial Sequence
  Description of Artificial Sequence: Synthetic oligonucleotide
ttaaagttccaaacag

SEQ ID NO: 1144 - DNA, 16 bp, Artificial Sequence
  Description of Artificial Sequence: Synthetic oligonucleotide
ctaggttccattgttc

SEQ ID NO: 1145 - DNA, 16 bp, Artificial Sequence
  Description of Artificial Sequence: Synthetic oligonucleotide
actaggttccattgtt

SEQ ID NO: 1146 - DNA, 16 bp, Artificial Sequence
  Description of Artificial Sequence: Synthetic oligonucleotide
tactaggttccattgt

SEQ ID NO: 1147 - DNA, 16 bp, Artificial Sequence
  Description of Artificial Sequence: Synthetic oligonucleotide
ttactaggttccattg

SEQ ID NO: 1148 - DNA, 16 bp, Artificial Sequence
  Description of Artificial Sequence: Synthetic oligonucleotide
attactaggttccatt

SEQ ID NO: 1149 - DNA, 16 bp, Artificial Sequence
  Description of Artificial Sequence: Synthetic oligonucleotide
tattactaggttccat

SEQ ID NO: 1150 - DNA, 16 bp, Artificial Sequence
  Description of Artificial Sequence: Synthetic oligonucleotide
ctattactaggttcca

SEQ ID NO: 1151 - DNA, 16 bp, Artificial Sequence
  Description of Artificial Sequence: Synthetic oligonucleotide
cctattactaggttcc

SEQ ID NO: 1152 - DNA, 16 bp, Artificial Sequence
  Description of Artificial Sequence: Synthetic oligonucleotide
acctattactaggttc

SEQ ID NO: 1153 - DNA, 16 bp, Artificial Sequence
  Description of Artificial Sequence: Synthetic oligonucleotide
aacctattactaggtt

SEQ ID NO: 1154 - DNA, 16 bp, Artificial Sequence
  Description of Artificial Sequence: Synthetic oligonucleotide
aaacctattactaggt

SEQ ID NO: 1155 - DNA, 16 bp, Artificial Sequence
  Description of Artificial Sequence: Synthetic oligonucleotide
gaaacctattactagg

SEQ ID NO: 1156 - DNA, 16 bp, Artificial Sequence
  Description of Artificial Sequence: Synthetic oligonucleotide
cagcagcaagcacaaa

SEQ ID NO: 1157 - DNA, 16 bp, Artificial Sequence
  Description of Artificial Sequence: Synthetic oligonucleotide
acagcagcaagcacaa

SEQ ID NO: 1158 - DNA, 16 bp, Artificial Sequence
  Description of Artificial Sequence: Synthetic oligonucleotide
gccacatcaagcctac

SEQ ID NO: 1159 - DNA, 16 bp, Artificial Sequence
  Description of Artificial Sequence: Synthetic oligonucleotide
agccacatcaagccta

SEQ ID NO: 1160 - DNA, 16 bp, Artificial Sequence
  Description of Artificial Sequence: Synthetic oligonucleotide
gcgttcgtgatgtagc

SEQ ID NO: 1161 - DNA, 16 bp, Artificial Sequence
  Description of Artificial Sequence: Synthetic oligonucleotide
agcgttcgtgatgtag

SEQ ID NO: 1162 - DNA, 16 bp, Artificial Sequence
  Description of Artificial Sequence: Synthetic oligonucleotide
aagcgttcgtgatgta

SEQ ID NO: 1163 - DNA, 16 bp, Artificial Sequence
  Description of Artificial Sequence: Synthetic oligonucleotide
aaagcgttcgtgatgt

SEQ ID NO: 1164 - DNA, 16 bp, Artificial Sequence
  Description of Artificial Sequence: Synthetic oligonucleotide
gaaagcgttcgtgatg

SEQ ID NO: 1165 - DNA, 16 bp, Artificial Sequence
  Description of Artificial Sequence: Synthetic oligonucleotide
agaaagcgttcgtgat

SEQ ID NO: 1166 - DNA, 16 bp, Artificial Sequence
  Description of Artificial Sequence: Synthetic oligonucleotide
aagaaagcgttcgtga

SEQ ID NO: 1167 - DNA, 16 bp, Artificial Sequence
  Description of Artificial Sequence: Synthetic oligonucleotide
taagaaagcgttcgtg

SEQ ID NO: 1168 - DNA, 16 bp, Artificial Sequence
  Description of Artificial Sequence: Synthetic oligonucleotide
ataagaaagcgttcgt

SEQ ID NO: 1169 - DNA, 16 bp, Artificial Sequence
  Description of Artificial Sequence: Synthetic oligonucleotide
aataagaaagcgttcg

SEQ ID NO: 1170 - DNA, 16 bp, Artificial Sequence
  Description of Artificial Sequence: Synthetic oligonucleotide
taataagaaagcgttc

SEQ ID NO: 1171 - DNA, 16 bp, Artificial Sequence
  Description of Artificial Sequence: Synthetic oligonucleotide
gtaataagaaagcgtt

SEQ ID NO: 1172 - DNA, 16 bp, Artificial Sequence
  Description of Artificial Sequence: Synthetic oligonucleotide
tgtaataagaaagcgt

SEQ ID NO: 1173 - DNA, 16 bp, Artificial Sequence
  Description of Artificial Sequence: Synthetic oligonucleotide
ttgtaataagaaagcg

SEQ ID NO: 1174 - DNA, 16 bp, Artificial Sequence
  Description of Artificial Sequence: Synthetic oligonucleotide
tttgtaataagaaagc

SEQ ID NO: 1175 - DNA, 16 bp, Artificial Sequence
  Description of Artificial Sequence: Synthetic oligonucleotide
atttgtaataagaaag

SEQ ID NO: 1176 - DNA, 16 bp, Artificial Sequence
  Description of Artificial Sequence: Synthetic oligonucleotide
aatttgtaataagaaa

SEQ ID NO: 1177 - DNA, 16 bp, Artificial Sequence
  Description of Artificial Sequence: Synthetic oligonucleotide
atgcagcaaaacctga

SEQ ID NO: 1178 - DNA, 16 bp, Artificial Sequence
  Description of Artificial Sequence: Synthetic oligonucleotide
tatgcagcaaaacctg

SEQ ID NO: 1179 - DNA, 16 bp, Artificial Sequence
  Description of Artificial Sequence: Synthetic oligonucleotide
gtatgcagcaaaacct

SEQ ID NO: 1180 - DNA, 16 bp, Artificial Sequence
  Description of Artificial Sequence: Synthetic oligonucleotide
tgtatgcagcaaaacc

SEQ ID NO: 1181 - DNA, 16 bp, Artificial Sequence
  Description of Artificial Sequence: Synthetic oligonucleotide
gcaaagcaatattgtc

SEQ ID NO: 1182 - DNA, 16 bp, Artificial Sequence
  Description of Artificial Sequence: Synthetic oligonucleotide
agcaaagcaatattgt

SEQ ID NO: 1183 - DNA, 16 bp, Artificial Sequence
  Description of Artificial Sequence: Synthetic oligonucleotide
ttgtcacttactgtac

SEQ ID NO: 1184 - DNA, 16 bp, Artificial Sequence
  Description of Artificial Sequence: Synthetic oligonucleotide
gttgtcacttactgta

SEQ ID NO: 1185 - DNA, 16 bp, Artificial Sequence
  Description of Artificial Sequence: Synthetic oligonucleotide
tgttgtcacttactgt

SEQ ID NO: 1186 - DNA, 16 bp, Artificial Sequence
  Description of Artificial Sequence: Synthetic oligonucleotide
ctgttgtcacttactg

SEQ ID NO: 1187 - DNA, 16 bp, Artificial Sequence
  Description of Artificial Sequence: Synthetic oligonucleotide
tctgttgtcacttact

SEQ ID NO: 1188 - DNA, 16 bp, Artificial Sequence
  Description of Artificial Sequence: Synthetic oligonucleotide
atctgttgtcacttac

SEQ ID NO: 1189 - DNA, 16 bp, Artificial Sequence
  Description of Artificial Sequence: Synthetic oligonucleotide
catctgttgtcactta

SEQ ID NO: 1190 - DNA, 16 bp, Artificial Sequence
  Description of Artificial Sequence: Synthetic oligonucleotide
acatctgttgtcactt

SEQ ID NO: 1191 - DNA, 16 bp, Artificial Sequence
  Description of Artificial Sequence: Synthetic oligonucleotide
aacatctgttgtcact

SEQ ID NO: 1192 - DNA, 16 bp, Artificial Sequence
  Description of Artificial Sequence: Synthetic oligonucleotide
aaacatctgttgtcac

SEQ ID NO: 1193 - DNA, 16 bp, Artificial Sequence
  Description of Artificial Sequence: Synthetic oligonucleotide
gaaacatctgttgtca

SEQ ID NO: 1194 - DNA, 16 bp, Artificial Sequence
  Description of Artificial Sequence: Synthetic oligonucleotide
tgaaacatctgttgtc

SEQ ID NO: 1195 - DNA, 16 bp, Artificial Sequence
  Description of Artificial Sequence: Synthetic oligonucleotide
atgaaacatctgttgt

SEQ ID NO: 1196 - DNA, 16 bp, Artificial Sequence
  Description of Artificial Sequence: Synthetic oligonucleotide
gatgaaacatctgttg

SEQ ID NO: 1197 - DNA, 16 bp, Artificial Sequence
  Description of Artificial Sequence: Synthetic oligonucleotide
agatgaaacatctgtt

SEQ ID NO: 1198 - DNA, 16 bp, Artificial Sequence
  Description of Artificial Sequence: Synthetic oligonucleotide
tcatgttcgtttaatc

SEQ ID NO: 1199 - DNA, 16 bp, Artificial Sequence
  Description of Artificial Sequence: Synthetic oligonucleotide
ttcatgttcgtttaat

SEQ ID NO: 1200 - DNA, 16 bp, Artificial Sequence
  Description of Artificial Sequence: Synthetic oligonucleotide
tttcatgttcgtttaa

SEQ ID NO: 1201 - DNA, 16 bp, Artificial Sequence
  Description of Artificial Sequence: Synthetic oligonucleotide
ttttcatgttcgttta

SEQ ID NO: 1202 - DNA, 16 bp, Artificial Sequence
  Description of Artificial Sequence: Synthetic oligonucleotide
attttcatgttcgttt

SEQ ID NO: 1203 - DNA, 16 bp, Artificial Sequence
  Description of Artificial Sequence: Synthetic oligonucleotide
aattttcatgttcgtt

SEQ ID NO: 1204 - DNA, 16 bp, Artificial Sequence
  Description of Artificial Sequence: Synthetic oligonucleotide
taattttcatgttcgt

SEQ ID NO: 1205 - DNA, 16 bp, Artificial Sequence
  Description of Artificial Sequence: Synthetic oligonucleotide
ataattttcatgttcg

SEQ ID NO: 1206 - DNA, 16 bp, Artificial Sequence
  Description of Artificial Sequence: Synthetic oligonucleotide
aataattttcatgttc

SEQ ID NO: 1207 - DNA, 16 bp, Artificial Sequence
  Description of Artificial Sequence: Synthetic oligonucleotide
gaataattttcatgtt

SEQ ID NO: 1208 - DNA, 16 bp, Artificial Sequence
  Description of Artificial Sequence: Synthetic oligonucleotide
agaataattttcatgt

SEQ ID NO: 1209 - DNA, 16 bp, Artificial Sequence
  Description of Artificial Sequence: Synthetic oligonucleotide
tacctctaacacactc

SEQ ID NO: 1210 - DNA, 16 bp, Artificial Sequence
  Description of Artificial Sequence: Synthetic oligonucleotide
gtacctctaacacact

SEQ ID NO: 1211 - DNA, 16 bp, Artificial Sequence
  Description of Artificial Sequence: Synthetic oligonucleotide
gtgaattgccctcgta

SEQ ID NO: 1212 - DNA, 16 bp, Artificial Sequence
  Description of Artificial Sequence: Synthetic oligonucleotide
ggtgaattgccctcgt

SEQ ID NO: 1213 - DNA, 16 bp, Artificial Sequence
  Description of Artificial Sequence: Synthetic oligonucleotide
tggtgaattgccctcg

SEQ ID NO: 1214 - DNA, 16 bp, Artificial Sequence
  Description of Artificial Sequence: Synthetic oligonucleotide
atggtgaattgccctc

SEQ ID NO: 1215 - DNA, 16 bp, Artificial Sequence
  Description of Artificial Sequence: Synthetic oligonucleotide
aatggtgaattgccct

SEQ ID NO: 1216 - DNA, 16 bp, Artificial Sequence
  Description of Artificial Sequence: Synthetic oligonucleotide
aaatggtgaattgccc

SEQ ID NO: 1217 - DNA, 16 bp, Artificial Sequence
  Description of Artificial Sequence: Synthetic oligonucleotide
gaaatggtgaattgcc

SEQ ID NO: 1218 - DNA, 16 bp, Artificial Sequence
  Description of Artificial Sequence: Synthetic oligonucleotide
tgaaatggtgaattgc

SEQ ID NO: 1219 - DNA, 16 bp, Artificial Sequence
  Description of Artificial Sequence: Synthetic oligonucleotide
cctcttgtctgatgaa

SEQ ID NO: 1220 - DNA, 16 bp, Artificial Sequence
  Description of Artificial Sequence: Synthetic oligonucleotide
tcctcttgtctgatga

SEQ ID NO: 1221 - DNA, 16 bp, Artificial Sequence
  Description of Artificial Sequence: Synthetic oligonucleotide
aatagaagtcaattaa

SEQ ID NO: 1222 - DNA, 16 bp, Artificial Sequence
  Description of Artificial Sequence: Synthetic oligonucleotide
aaatagaagtcaatta

SEQ ID NO: 1223 - DNA, 16 bp, Artificial Sequence
  Description of Artificial Sequence: Synthetic oligonucleotide
caaatagaagtcaatt

SEQ ID NO: 1224 - DNA, 16 bp, Artificial Sequence
  Description of Artificial Sequence: Synthetic oligonucleotide
acaaatagaagtcaat

SEQ ID NO: 1225 - DNA, 16 bp, Artificial Sequence
  Description of Artificial Sequence: Synthetic oligonucleotide
cacaaatagaagtcaa

SEQ ID NO: 1226 - DNA, 16 bp, Artificial Sequence
  Description of Artificial Sequence: Synthetic oligonucleotide
gcacaaatagaagtca

SEQ ID NO: 1227 - DNA, 16 bp, Artificial Sequence
  Description of Artificial Sequence: Synthetic oligonucleotide
agcacaaatagaagtc

SEQ ID NO: 1228 - DNA, 16 bp, Artificial Sequence
  Description of Artificial Sequence: Synthetic oligonucleotide
aagcacaaatagaagt

SEQ ID NO: 1229 - DNA, 16 bp, Artificial Sequence
  Description of Artificial Sequence: Synthetic oligonucleotide
aaagcacaaatagaag

SEQ ID NO: 1230 - DNA, 16 bp, Artificial Sequence
  Description of Artificial Sequence: Synthetic oligonucleotide
aaaagcacaaatagaa

SEQ ID NO: 1231 - DNA, 16 bp, Artificial Sequence
  Description of Artificial Sequence: Synthetic oligonucleotide
aaaaagcacaaataga

SEQ ID NO: 1232 - DNA, 16 bp, Artificial Sequence
  Description of Artificial Sequence: Synthetic oligonucleotide
taaaaagcacaaatag

SEQ ID NO: 1233 - DNA, 16 bp, Artificial Sequence
  Description of Artificial Sequence: Synthetic oligonucleotide
ctaaaaagcacaaata

SEQ ID NO: 1234 - DNA, 16 bp, Artificial Sequence
  Description of Artificial Sequence: Synthetic oligonucleotide
gctaaaaagcacaaat

SEQ ID NO: 1235 - DNA, 16 bp, Artificial Sequence
  Description of Artificial Sequence: Synthetic oligonucleotide
ggctaaaaagcacaaa

SEQ ID NO: 1236 - DNA, 16 bp, Artificial Sequence
  Description of Artificial Sequence: Synthetic oligonucleotide
aggctaaaaagcacaa

SEQ ID NO: 1237 - DNA, 16 bp, Artificial Sequence
  Description of Artificial Sequence: Synthetic oligonucleotide
aaggctaaaaagcaca

SEQ ID NO: 1238 - DNA, 16 bp, Artificial Sequence
  Description of Artificial Sequence: Synthetic oligonucleotide
aaaggctaaaaagcac

SEQ ID NO: 1239 - DNA, 16 bp, Artificial Sequence
  Description of Artificial Sequence: Synthetic oligonucleotide
gaaaggctaaaaagca

SEQ ID NO: 1240 - DNA, 16 bp, Artificial Sequence
  Description of Artificial Sequence: Synthetic oligonucleotide
agaaaggctaaaaagc

SEQ ID NO: 1241 - DNA, 16 bp, Artificial Sequence
  Description of Artificial Sequence: Synthetic oligonucleotide
cagaaaggctaaaaag

SEQ ID NO: 1242 - DNA, 16 bp, Artificial Sequence
  Description of Artificial Sequence: Synthetic oligonucleotide
gcagaaaggctaaaaa

SEQ ID NO: 1243 - DNA, 16 bp, Artificial Sequence
  Description of Artificial Sequence: Synthetic oligonucleotide
agcagaaaggctaaaa

SEQ ID NO: 1244 - DNA, 16 bp, Artificial Sequence
  Description of Artificial Sequence: Synthetic oligonucleotide
tagcagaaaggctaaa

SEQ ID NO: 1245 - DNA, 16 bp, Artificial Sequence
  Description of Artificial Sequence: Synthetic oligonucleotide
atagcagaaaggctaa

SEQ ID NO: 1246 - DNA, 16 bp, Artificial Sequence
  Description of Artificial Sequence: Synthetic oligonucleotide
aatagcagaaaggcta

SEQ ID NO: 1247 - DNA, 16 bp, Artificial Sequence
  Description of Artificial Sequence: Synthetic oligonucleotide
gaatagcagaaaggct

SEQ ID NO: 1248 - DNA, 16 bp, Artificial Sequence
  Description of Artificial Sequence: Synthetic oligonucleotide
ggaatagcagaaaggc

SEQ ID NO: 1249 - DNA, 16 bp, Artificial Sequence
  Description of Artificial Sequence: Synthetic oligonucleotide
aggaatagcagaaagg

SEQ ID NO: 1250 - DNA, 16 bp, Artificial Sequence
  Description of Artificial Sequence: Synthetic oligonucleotide
aaggaatagcagaaag

SEQ ID NO: 1251 - DNA, 16 bp, Artificial Sequence
  Description of Artificial Sequence: Synthetic oligonucleotide
caaggaatagcagaaa

SEQ ID NO: 1252 - DNA, 16 bp, Artificial Sequence
  Description of Artificial Sequence: Synthetic oligonucleotide
acaaggaatagcagaa

SEQ ID NO: 1253 - DNA, 16 bp, Artificial Sequence
  Description of Artificial Sequence: Synthetic oligonucleotide
aacaaggaatagcaga

SEQ ID NO: 1254 - DNA, 16 bp, Artificial Sequence
  Description of Artificial Sequence: Synthetic oligonucleotide
tttcatgttcgtttag

SEQ ID NO: 1255 - DNA, 16 bp, Artificial Sequence
  Description of Artificial Sequence: Synthetic oligonucleotide
attatcagacatttta

SEQ ID NO: 1256 - DNA, 16 bp, Artificial Sequence
  Description of Artificial Sequence: Synthetic oligonucleotide
cattatcagacatttt

SEQ ID NO: 1257 - DNA, 16 bp, Artificial Sequence
  Description of Artificial Sequence: Synthetic oligonucleotide
ccattatcagacattt

SEQ ID NO: 1258 - DNA, 16 bp, Artificial Sequence
  Description of Artificial Sequence: Synthetic oligonucleotide
tccattatcagacatt

SEQ ID NO: 1259 - DNA, 16 bp, Artificial Sequence
  Description of Artificial Sequence: Synthetic oligonucleotide
gtccattatcagacat

SEQ ID NO: 1260 - DNA, 16 bp, Artificial Sequence
  Description of Artificial Sequence: Synthetic oligonucleotide
ggtccattatcagaca

SEQ ID NO: 1261 - DNA, 16 bp, Artificial Sequence
  Description of Artificial Sequence: Synthetic oligonucleotide
gggtccattatcagac

SEQ ID NO: 1262 - DNA, 16 bp, Artificial Sequence
  Description of Artificial Sequence: Synthetic oligonucleotide
ggggtccattatcaga

SEQ ID NO: 1263 - DNA, 16 bp, Artificial Sequence
  Description of Artificial Sequence: Synthetic oligonucleotide
tggggtccattatcag

SEQ ID NO: 1264 - DNA, 16 bp, Artificial Sequence
  Description of Artificial Sequence: Synthetic oligonucleotide
ttggggtccattatca

SEQ ID NO: 1265 - DNA, 16 bp, Artificial Sequence
  Description of Artificial Sequence: Synthetic oligonucleotide
tttggggtccattatc

SEQ ID NO: 1266 - DNA, 16 bp, Artificial Sequence
  Description of Artificial Sequence: Synthetic oligonucleotide
ttttggggtccattat

SEQ ID NO: 1267 - DNA, 16 bp, Artificial Sequence
  Description of Artificial Sequence: Synthetic oligonucleotide
tgggtaaaccttgggg

SEQ ID NO: 1268 - DNA, 16 bp, Artificial Sequence
  Description of Artificial Sequence: Synthetic oligonucleotide
ttgggtaaaccttggg

SEQ ID NO: 1269 - DNA, 16 bp, Artificial Sequence
  Description of Artificial Sequence: Synthetic oligonucleotide
attgggtaaaccttgg

SEQ ID NO: 1270 - DNA, 16 bp, Artificial Sequence
  Description of Artificial Sequence: Synthetic oligonucleotide
tattgggtaaaccttg

SEQ ID NO: 1271 - DNA, 16 bp, Artificial Sequence
  Description of Artificial Sequence: Synthetic oligonucleotide
ttattgggtaaacctt

SEQ ID NO: 1272 - DNA, 16 bp, Artificial Sequence
  Description of Artificial Sequence: Synthetic oligonucleotide
attattgggtaaacct

SEQ ID NO: 1273 - DNA, 16 bp, Artificial Sequence
  Description of Artificial Sequence: Synthetic oligonucleotide
tattattgggtaaacc

SEQ ID NO: 1274 - DNA, 16 bp, Artificial Sequence
  Description of Artificial Sequence: Synthetic oligonucleotide
gtattattgggtaaac

SEQ ID NO: 1275 - DNA, 16 bp, Artificial Sequence
  Description of Artificial Sequence: Synthetic oligonucleotide
agtattattgggtaaa

SEQ ID NO: 1276 - DNA, 16 bp, Artificial Sequence
  Description of Artificial Sequence: Synthetic oligonucleotide
cagtattattgggtaa

SEQ ID NO: 1277 - DNA, 16 bp, Artificial Sequence
  Description of Artificial Sequence: Synthetic oligonucleotide
gcagtattattgggta

SEQ ID NO: 1278 - DNA, 16 bp, Artificial Sequence
  Description of Artificial Sequence: Synthetic oligonucleotide
cgcagtattattgggt

SEQ ID NO: 1279 - DNA, 16 bp, Artificial Sequence
  Description of Artificial Sequence: Synthetic oligonucleotide
acgcagtattattggg

SEQ ID NO: 1280 - DNA, 16 bp, Artificial Sequence
  Description of Artificial Sequence: Synthetic oligonucleotide
gacgcagtattattgg

SEQ ID NO: 1281 - DNA, 16 bp, Artificial Sequence
  Description of Artificial Sequence: Synthetic oligonucleotide
agacgcagtattattg

SEQ ID NO: 1282 - DNA, 16 bp, Artificial Sequence
  Description of Artificial Sequence: Synthetic oligonucleotide
aagacgcagtattatt

SEQ ID NO: 1283 - DNA, 16 bp, Artificial Sequence
  Description of Artificial Sequence: Synthetic oligonucleotide
caagacgcagtattat

SEQ ID NO: 1284 - DNA, 16 bp, Artificial Sequence
  Description of Artificial Sequence: Synthetic oligonucleotide
ccaagacgcagtatta

SEQ ID NO: 1285 - DNA, 16 bp, Artificial Sequence
  Description of Artificial Sequence: Synthetic oligonucleotide
accaagacgcagtatt

SEQ ID NO: 1286 - DNA, 16 bp, Artificial Sequence
  Description of Artificial Sequence: Synthetic oligonucleotide
aaccaagacgcagtat

SEQ ID NO: 1287 - DNA, 16 bp, Artificial Sequence
  Description of Artificial Sequence: Synthetic oligonucleotide
gaaccaagacgcagta

SEQ ID NO: 1288 - DNA, 16 bp, Artificial Sequence
  Description of Artificial Sequence: Synthetic oligonucleotide
tgaaccaagacgcagt

SEQ ID NO: 1289 - DNA, 16 bp, Artificial Sequence
  Description of Artificial Sequence: Synthetic oligonucleotide
gtgaaccaagacgcag

SEQ ID NO: 1290 - DNA, 16 bp, Artificial Sequence
  Description of Artificial Sequence: Synthetic oligonucleotide
gccaatttggtcatct

SEQ ID NO: 1291 - DNA, 16 bp, Artificial Sequence
  Description of Artificial Sequence: Synthetic oligonucleotide
agccaatttggtcatc

SEQ ID NO: 1292 - DNA, 16 bp, Artificial Sequence
  Description of Artificial Sequence: Synthetic oligonucleotide
tagccaatttggtcat

SEQ ID NO: 1293 - DNA, 16 bp, Artificial Sequence
  Description of Artificial Sequence: Synthetic oligonucleotide
gtagccaatttggtca

SEQ ID NO: 1294 - DNA, 16 bp, Artificial Sequence
  Description of Artificial Sequence: Synthetic oligonucleotide
agtagccaatttggtc

SEQ ID NO: 1295 - DNA, 16 bp, Artificial Sequence
  Description of Artificial Sequence: Synthetic oligonucleotide
tagtagccaatttggt

SEQ ID NO: 1296 - DNA, 16 bp, Artificial Sequence
  Description of Artificial Sequence: Synthetic oligonucleotide
gtagtagccaatttgg

SEQ ID NO: 1297 - DNA, 16 bp, Artificial Sequence
  Description of Artificial Sequence: Synthetic oligonucleotide
ggtagtagccaatttg

SEQ ID NO: 1298 - DNA, 16 bp, Artificial Sequence
  Description of Artificial Sequence: Synthetic oligonucleotide
cggtagtagccaattt

SEQ ID NO: 1299 - DNA, 16 bp, Artificial Sequence
  Description of Artificial Sequence: Synthetic oligonucleotide
tcggtagtagccaatt

SEQ ID NO: 1300 - DNA, 16 bp, Artificial Sequence
  Description of Artificial Sequence: Synthetic oligonucleotide
ttcggtagtagccaat

SEQ ID NO: 1301 - DNA, 16 bp, Artificial Sequence
  Description of Artificial Sequence: Synthetic oligonucleotide
cttcggtagtagccaa

SEQ ID NO: 1302 - DNA, 16 bp, Artificial Sequence
  Description of Artificial Sequence: Synthetic oligonucleotide
tcttcggtagtagcca

SEQ ID NO: 1303 - DNA, 16 bp, Artificial Sequence
  Description of Artificial Sequence: Synthetic oligonucleotide
ctcttcggtagtagcc

SEQ ID NO: 1304 - DNA, 16 bp, Artificial Sequence
  Description of Artificial Sequence: Synthetic oligonucleotide
gctcttcggtagtagc

SEQ ID NO: 1305 - DNA, 16 bp, Artificial Sequence
  Description of Artificial Sequence: Synthetic oligonucleotide
agctcttcggtagtag

SEQ ID NO: 1306 - DNA, 16 bp, Artificial Sequence
  Description of Artificial Sequence: Synthetic oligonucleotide
tagctcttcggtagta

SEQ ID NO: 1307 - DNA, 16 bp, Artificial Sequence
  Description of Artificial Sequence: Synthetic oligonucleotide
gtagctcttcggtagt

SEQ ID NO: 1308 - DNA, 16 bp, Artificial Sequence
  Description of Artificial Sequence: Synthetic oligonucleotide
ggtagctcttcggtag

SEQ ID NO: 1309 - DNA, 16 bp, Artificial Sequence
  Description of Artificial Sequence: Synthetic oligonucleotide
ccgtcaccaccacgaa

SEQ ID NO: 1310 - DNA, 16 bp, Artificial Sequence
  Description of Artificial Sequence: Synthetic oligonucleotide
aggctccctcagttgc

SEQ ID NO: 1311 - DNA, 16 bp, Artificial Sequence
  Description of Artificial Sequence: Synthetic oligonucleotide
aaggctccctcagttg

SEQ ID NO: 1312 - DNA, 16 bp, Artificial Sequence
  Description of Artificial Sequence: Synthetic oligonucleotide
caaggctccctcagtt

SEQ ID NO: 1313 - DNA, 16 bp, Artificial Sequence
  Description of Artificial Sequence: Synthetic oligonucleotide
tcaaggctccctcagt

SEQ ID NO: 1314 - DNA, 16 bp, Artificial Sequence
  Description of Artificial Sequence: Synthetic oligonucleotide
ttcaaggctccctcag

SEQ ID NO: 1315 - DNA, 16 bp, Artificial Sequence
  Description of Artificial Sequence: Synthetic oligonucleotide
tgcgggtgccaatgtg

SEQ ID NO: 1316 - DNA, 16 bp, Artificial Sequence
  Description of Artificial Sequence: Synthetic oligonucleotide
ttgcgggtgccaatgt

SEQ ID NO: 1317 - DNA, 16 bp, Artificial Sequence
  Description of Artificial Sequence: Synthetic oligonucleotide
attgcgggtgccaatg

SEQ ID NO: 1318 - DNA, 16 bp, Artificial Sequence
  Description of Artificial Sequence: Synthetic oligonucleotide
gattgcgggtgccaat

SEQ ID NO: 1319 - DNA, 16 bp, Artificial Sequence
  Description of Artificial Sequence: Synthetic oligonucleotide
ggattgcgggtgccaa

SEQ ID NO: 1320 - DNA, 16 bp, Artificial Sequence
  Description of Artificial Sequence: Synthetic oligonucleotide
aggattgcgggtgcca

SEQ ID NO: 1321 - DNA, 16 bp, Artificial Sequence
  Description of Artificial Sequence: Synthetic oligonucleotide
aggaagttgtagcacg

SEQ ID NO: 1322 - DNA, 16 bp, Artificial Sequence
  Description of Artificial Sequence: Synthetic oligonucleotide
gaggaagttgtagcac

SEQ ID NO: 1323 - DNA, 16 bp, Artificial Sequence
  Description of Artificial Sequence: Synthetic oligonucleotide
tgaggaagttgtagca

SEQ ID NO: 1324 - DNA, 16 bp, Artificial Sequence
  Description of Artificial Sequence: Synthetic oligonucleotide
ttgaggaagttgtagc

SEQ ID NO: 1325 - DNA, 16 bp, Artificial Sequence
  Description of Artificial Sequence: Synthetic oligonucleotide
cttgaggaagttgtag

SEQ ID NO: 1326 - DNA, 16 bp, Artificial Sequence
  Description of Artificial Sequence: Synthetic oligonucleotide
ccttgaggaagttgta

SEQ ID NO: 1327 - DNA, 16 bp, Artificial Sequence
  Description of Artificial Sequence: Synthetic oligonucleotide
tccttgaggaagttgt

SEQ ID NO: 1328 - DNA, 16 bp, Artificial Sequence
  Description of Artificial Sequence: Synthetic oligonucleotide
ttccttgaggaagttg

SEQ ID NO: 1329 - DNA, 16 bp, Artificial Sequence
  Description of Artificial Sequence: Synthetic oligonucleotide
gttccttgaggaagtt

SEQ ID NO: 1330 - DNA, 16 bp, Artificial Sequence
  Description of Artificial Sequence: Synthetic oligonucleotide
tgttccttgaggaagt

SEQ ID NO: 1331 - DNA, 16 bp, Artificial Sequence
  Description of Artificial Sequence: Synthetic oligonucleotide
ttgttccttgaggaag

SEQ ID NO: 1332 - DNA, 16 bp, Artificial Sequence
  Description of Artificial Sequence: Synthetic oligonucleotide
gttgttccttgaggaa

SEQ ID NO: 1333 - DNA, 16 bp, Artificial Sequence
  Description of Artificial Sequence: Synthetic oligonucleotide
tgttgttccttgagga

SEQ ID NO: 1334 - DNA, 16 bp, Artificial Sequence
  Description of Artificial Sequence: Synthetic oligonucleotide
atgttgttccttgagg

SEQ ID NO: 1335 - DNA, 16 bp, Artificial Sequence
  Description of Artificial Sequence: Synthetic oligonucleotide
aatgttgttccttgag

SEQ ID NO: 1336 - DNA, 16 bp, Artificial Sequence
  Description of Artificial Sequence: Synthetic oligonucleotide
caatgttgttccttga

SEQ ID NO: 1337 - DNA, 16 bp, Artificial Sequence
  Description of Artificial Sequence: Synthetic oligonucleotide
gcaatgttgttccttg

SEQ ID NO: 1338 - DNA, 16 bp, Artificial Sequence
  Description of Artificial Sequence: Synthetic oligonucleotide
ggcaatgttgttcctt

SEQ ID NO: 1339 - DNA, 16 bp, Artificial Sequence
  Description of Artificial Sequence: Synthetic oligonucleotide
tggcaatgttgttcct

SEQ ID NO: 1340 - DNA, 16 bp, Artificial Sequence
  Description of Artificial Sequence: Synthetic oligonucleotide
ttggcaatgttgttcc

SEQ ID NO: 1341 - DNA, 16 bp, Artificial Sequence
  Description of Artificial Sequence: Synthetic oligonucleotide
tttggcaatgttgttc

SEQ ID NO: 1342 - DNA, 16 bp, Artificial Sequence
  Description of Artificial Sequence: Synthetic oligonucleotide
ttttggcaatgttgtt

SEQ ID NO: 1343 - DNA, 16 bp, Artificial Sequence
  Description of Artificial Sequence: Synthetic oligonucleotide
cttttggcaatgttgt

SEQ ID NO: 1344 - DNA, 16 bp, Artificial Sequence
  Description of Artificial Sequence: Synthetic oligonucleotide
ccttttggcaatgttg

SEQ ID NO: 1345 - DNA, 16 bp, Artificial Sequence
  Description of Artificial Sequence: Synthetic oligonucleotide
gccttttggcaatgtt

SEQ ID NO: 1346 - DNA, 16 bp, Artificial Sequence
  Description of Artificial Sequence: Synthetic oligonucleotide
agccttttggcaatgt

SEQ ID NO: 1347 - DNA, 16 bp, Artificial Sequence
  Description of Artificial Sequence: Synthetic oligonucleotide
aagccttttggcaatg

SEQ ID NO: 1348 - DNA, 16 bp, Artificial Sequence
  Description of Artificial Sequence: Synthetic oligonucleotide
gaagccttttggcaat

SEQ ID NO: 1349 - DNA, 16 bp, Artificial Sequence
  Description of Artificial Sequence: Synthetic oligonucleotide
agaagccttttggcaa

SEQ ID NO: 1350 - DNA, 16 bp, Artificial Sequence
  Description of Artificial Sequence: Synthetic oligonucleotide
tagaagccttttggca

SEQ ID NO: 1351 - DNA, 16 bp, Artificial Sequence
  Description of Artificial Sequence: Synthetic oligonucleotide
gtagaagccttttggc

SEQ ID NO: 1352 - DNA, 16 bp, Artificial Sequence
  Description of Artificial Sequence: Synthetic oligonucleotide
cgtagaagccttttgg

SEQ ID NO: 1353 - DNA, 16 bp, Artificial Sequence
  Description of Artificial Sequence: Synthetic oligonucleotide
gcgtagaagccttttg

SEQ ID NO: 1354 - DNA, 16 bp, Artificial Sequence
  Description of Artificial Sequence: Synthetic oligonucleotide
tgcgtagaagcctttt

SEQ ID NO: 1355 - DNA, 16 bp, Artificial Sequence
  Description of Artificial Sequence: Synthetic oligonucleotide
ctgcgtagaagccttt

SEQ ID NO: 1356 - DNA, 16 bp, Artificial Sequence
  Description of Artificial Sequence: Synthetic oligonucleotide
tctgcgtagaagcctt

SEQ ID NO: 1357 - DNA, 16 bp, Artificial Sequence
  Description of Artificial Sequence: Synthetic oligonucleotide
gactgccgcctctgct

SEQ ID NO: 1358 - DNA, 16 bp, Artificial Sequence
  Description of Artificial Sequence: Synthetic oligonucleotide
tgactgccgcctctgc

SEQ ID NO: 1359 - DNA, 16 bp, Artificial Sequence
  Description of Artificial Sequence: Synthetic oligonucleotide
ttgactgccgcctctg

SEQ ID NO: 1360 - DNA, 16 bp, Artificial Sequence
  Description of Artificial Sequence: Synthetic oligonucleotide
cttgactgccgcctct

SEQ ID NO: 1361 - DNA, 16 bp, Artificial Sequence
  Description of Artificial Sequence: Synthetic oligonucleotide
gcttgactgccgcctc

SEQ ID NO: 1362 - DNA, 16 bp, Artificial Sequence
  Description of Artificial Sequence: Synthetic oligonucleotide
ggcttgactgccgcct

SEQ ID NO: 1363 - DNA, 16 bp, Artificial Sequence
  Description of Artificial Sequence: Synthetic oligonucleotide
aggcttgactgccgcc

SEQ ID NO: 1364 - DNA, 16 bp, Artificial Sequence
  Description of Artificial Sequence: Synthetic oligonucleotide
gaggcttgactgccgc

SEQ ID NO: 1365 - DNA, 16 bp, Artificial Sequence
  Description of Artificial Sequence: Synthetic oligonucleotide
agaggcttgactgccg

SEQ ID NO: 1366 - DNA, 16 bp, Artificial Sequence
  Description of Artificial Sequence: Synthetic oligonucleotide
aagaggcttgactgcc

SEQ ID NO: 1367 - DNA, 16 bp, Artificial Sequence
  Description of Artificial Sequence: Synthetic oligonucleotide
gaagaggcttgactgc

SEQ ID NO: 1368 - DNA, 16 bp, Artificial Sequence
  Description of Artificial Sequence: Synthetic oligonucleotide
agaagaggcttgactg

SEQ ID NO: 1369 - DNA, 16 bp, Artificial Sequence
  Description of Artificial Sequence: Synthetic oligonucleotide
gagaagaggcttgact

SEQ ID NO: 1370 - DNA, 16 bp, Artificial Sequence
  Description of Artificial Sequence: Synthetic oligonucleotide
cgagaagaggcttgac

SEQ ID NO: 1371 - DNA, 16 bp, Artificial Sequence
  Description of Artificial Sequence: Synthetic oligonucleotide
agttgaatttcttgaa

SEQ ID NO: 1372 - DNA, 16 bp, Artificial Sequence
  Description of Artificial Sequence: Synthetic oligonucleotide
gagttgaatttcttga

SEQ ID NO: 1373 - DNA, 16 bp, Artificial Sequence
  Description of Artificial Sequence: Synthetic oligonucleotide
ggagttgaatttcttg

SEQ ID NO: 1374 - DNA, 16 bp, Artificial Sequence
  Description of Artificial Sequence: Synthetic oligonucleotide
ttcccctactgctgcc

SEQ ID NO: 1375 - DNA, 16 bp, Artificial Sequence
  Description of Artificial Sequence: Synthetic oligonucleotide
gctggttcaatctgtc

SEQ ID NO: 1376 - DNA, 16 bp, Artificial Sequence
  Description of Artificial Sequence: Synthetic oligonucleotide
agctggttcaatctgt

SEQ ID NO: 1377 - DNA, 16 bp, Artificial Sequence
  Description of Artificial Sequence: Synthetic oligonucleotide
aagctggttcaatctg

SEQ ID NO: 1378 - DNA, 16 bp, Artificial Sequence
  Description of Artificial Sequence: Synthetic oligonucleotide
caagctggttcaatct

SEQ ID NO: 1379 - DNA, 16 bp, Artificial Sequence
  Description of Artificial Sequence: Synthetic oligonucleotide
tcaagctggttcaatc

SEQ ID NO: 1380 - DNA, 16 bp, Artificial Sequence
  Description of Artificial Sequence: Synthetic oligonucleotide
ctcaagctggttcaat

SEQ ID NO: 1381 - DNA, 16 bp, Artificial Sequence
  Description of Artificial Sequence: Synthetic oligonucleotide
tctcaagctggttcaa

SEQ ID NO: 1382 - DNA, 16 bp, Artificial Sequence
  Description of Artificial Sequence: Synthetic oligonucleotide
ctctcaagctggttca

SEQ ID NO: 1383 - DNA, 16 bp, Artificial Sequence
  Description of Artificial Sequence: Synthetic oligonucleotide
gctctcaagctggttc

SEQ ID NO: 1384 - DNA, 16 bp, Artificial Sequence
  Description of Artificial Sequence: Synthetic oligonucleotide
tgctctcaagctggtt

SEQ ID NO: 1385 - DNA, 16 bp, Artificial Sequence
  Description of Artificial Sequence: Synthetic oligonucleotide
ttgctctcaagctggt

SEQ ID NO: 1386 - DNA, 16 bp, Artificial Sequence
  Description of Artificial Sequence: Synthetic oligonucleotide
tttgctctcaagctgg

SEQ ID NO: 1387 - DNA, 16 bp, Artificial Sequence
  Description of Artificial Sequence: Synthetic oligonucleotide
gttggcctttaccaga

SEQ ID NO: 1388 - DNA, 16 bp, Artificial Sequence
  Description of Artificial Sequence: Synthetic oligonucleotide
tgttggcctttaccag

SEQ ID NO: 1389 - DNA, 16 bp, Artificial Sequence
  Description of Artificial Sequence: Synthetic oligonucleotide
ttgttggcctttacca

SEQ ID NO: 1390 - DNA, 16 bp, Artificial Sequence
  Description of Artificial Sequence: Synthetic oligonucleotide
gttgttggcctttacc

SEQ ID NO: 1391 - DNA, 16 bp, Artificial Sequence
  Description of Artificial Sequence: Synthetic oligonucleotide
tgttgttggcctttac

SEQ ID NO: 1392 - DNA, 16 bp, Artificial Sequence
  Description of Artificial Sequence: Synthetic oligonucleotide
ttgttgttggccttta

SEQ ID NO: 1393 - DNA, 16 bp, Artificial Sequence
  Description of Artificial Sequence: Synthetic oligonucleotide
gttgttgttggccttt

SEQ ID NO: 1394 - DNA, 16 bp, Artificial Sequence
  Description of Artificial Sequence: Synthetic oligonucleotide
tgttgttgttggcctt

SEQ ID NO: 1395 - DNA, 16 bp, Artificial Sequence
  Description of Artificial Sequence: Synthetic oligonucleotide
ttgttgttgttggcct

SEQ ID NO: 1396 - DNA, 16 bp, Artificial Sequence
  Description of Artificial Sequence: Synthetic oligonucleotide
cttgttgttgttggcc

SEQ ID NO: 1397 - DNA, 16 bp, Artificial Sequence
  Description of Artificial Sequence: Synthetic oligonucleotide
ccttgttgttgttggc

SEQ ID NO: 1398 - DNA, 16 bp, Artificial Sequence
  Description of Artificial Sequence: Synthetic oligonucleotide
gccttgttgttgttgg

SEQ ID NO: 1399 - DNA, 16 bp, Artificial Sequence
  Description of Artificial Sequence: Synthetic oligonucleotide
ggccttgttgttgttg

SEQ ID NO: 1400 - DNA, 16 bp, Artificial Sequence
  Description of Artificial Sequence: Synthetic oligonucleotide
tggccttgttgttgtt

SEQ ID NO: 1401 - DNA, 16 bp, Artificial Sequence
  Description of Artificial Sequence: Synthetic oligonucleotide
ttggccttgttgttgt

SEQ ID NO: 1402 - DNA, 16 bp, Artificial Sequence
  Description of Artificial Sequence: Synthetic oligonucleotide
tttggccttgttgttg

SEQ ID NO: 1403 - DNA, 16 bp, Artificial Sequence
  Description of Artificial Sequence: Synthetic oligonucleotide
gtttggccttgttgtt

SEQ ID NO: 1404 - DNA, 16 bp, Artificial Sequence
  Description of Artificial Sequence: Synthetic oligonucleotide
agtttggccttgttgt

SEQ ID NO: 1405 - DNA, 16 bp, Artificial Sequence
  Description of Artificial Sequence: Synthetic oligonucleotide
cagtttggccttgttg

SEQ ID NO: 1406 - DNA, 16 bp, Artificial Sequence
  Description of Artificial Sequence: Synthetic oligonucleotide
acagtttggccttgtt

SEQ ID NO: 1407 - DNA, 16 bp, Artificial Sequence
  Description of Artificial Sequence: Synthetic oligonucleotide
gacagtttggccttgt

SEQ ID NO: 1408 - DNA, 16 bp, Artificial Sequence
  Description of Artificial Sequence: Synthetic oligonucleotide
tgacagtttggccttg

SEQ ID NO: 1409 - DNA, 16 bp, Artificial Sequence
  Description of Artificial Sequence: Synthetic oligonucleotide
gtgacagtttggcctt

SEQ ID NO: 1410 - DNA, 16 bp, Artificial Sequence
  Description of Artificial Sequence: Synthetic oligonucleotide
agtgacagtttggcct

SEQ ID NO: 1411 - DNA, 16 bp, Artificial Sequence
  Description of Artificial Sequence: Synthetic oligonucleotide
tagtgacagtttggcc

SEQ ID NO: 1412 - DNA, 16 bp, Artificial Sequence
  Description of Artificial Sequence: Synthetic oligonucleotide
ttagtgacagtttggc

SEQ ID NO: 1413 - DNA, 16 bp, Artificial Sequence
  Description of Artificial Sequence: Synthetic oligonucleotide
cttagtgacagtttgg

SEQ ID NO: 1414 - DNA, 16 bp, Artificial Sequence
  Description of Artificial Sequence: Synthetic oligonucleotide
tcttagtgacagtttg

SEQ ID NO: 1415 - DNA, 16 bp, Artificial Sequence
  Description of Artificial Sequence: Synthetic oligonucleotide
ttcttagtgacagttt

SEQ ID NO: 1416 - DNA, 16 bp, Artificial Sequence
  Description of Artificial Sequence: Synthetic oligonucleotide
tttcttagtgacagtt

SEQ ID NO: 1417 - DNA, 16 bp, Artificial Sequence
  Description of Artificial Sequence: Synthetic oligonucleotide
atttcttagtgacagt

SEQ ID NO: 1418 - DNA, 16 bp, Artificial Sequence
  Description of Artificial Sequence: Synthetic oligonucleotide
gatttcttagtgacag

SEQ ID NO: 1419 - DNA, 16 bp, Artificial Sequence
  Description of Artificial Sequence: Synthetic oligonucleotide
agatttcttagtgaca

SEQ ID NO: 1420 - DNA, 16 bp, Artificial Sequence
  Description of Artificial Sequence: Synthetic oligonucleotide
cagatttcttagtgac

SEQ ID NO: 1421 - DNA, 16 bp, Artificial Sequence
  Description of Artificial Sequence: Synthetic oligonucleotide
gcagatttcttagtga

SEQ ID NO: 1422 - DNA, 16 bp, Artificial Sequence
  Description of Artificial Sequence: Synthetic oligonucleotide
agcagatttcttagtg

SEQ ID NO: 1423 - DNA, 16 bp, Artificial Sequence
  Description of Artificial Sequence: Synthetic oligonucleotide
cagcagatttcttagt

SEQ ID NO: 1424 - DNA, 16 bp, Artificial Sequence
  Description of Artificial Sequence: Synthetic oligonucleotide
gcagcagatttcttag

SEQ ID NO: 1425 - DNA, 16 bp, Artificial Sequence
  Description of Artificial Sequence: Synthetic oligonucleotide
agcagcagatttctta

SEQ ID NO: 1426 - DNA, 16 bp, Artificial Sequence
  Description of Artificial Sequence: Synthetic oligonucleotide
cagcagcagatttctt

SEQ ID NO: 1427 - DNA, 16 bp, Artificial Sequence
  Description of Artificial Sequence: Synthetic oligonucleotide
tcagcagcagatttct

SEQ ID NO: 1428 - DNA, 16 bp, Artificial Sequence
  Description of Artificial Sequence: Synthetic oligonucleotide
ctcagcagcagatttc

SEQ ID NO: 1429 - DNA, 16 bp, Artificial Sequence
  Description of Artificial Sequence: Synthetic oligonucleotide
cctcagcagcagattt

SEQ ID NO: 1430 - DNA, 16 bp, Artificial Sequence
  Description of Artificial Sequence: Synthetic oligonucleotide
gcctcagcagcagatt

SEQ ID NO: 1431 - DNA, 16 bp, Artificial Sequence
  Description of Artificial Sequence: Synthetic oligonucleotide
ttccttgtctgattag

SEQ ID NO: 1432 - DNA, 16 bp, Artificial Sequence
  Description of Artificial Sequence: Synthetic oligonucleotide
gttccttgtctgatta

SEQ ID NO: 1433 - DNA, 16 bp, Artificial Sequence
  Description of Artificial Sequence: Synthetic oligonucleotide
agttccttgtctgatt

SEQ ID NO: 1434 - DNA, 16 bp, Artificial Sequence
  Description of Artificial Sequence: Synthetic oligonucleotide
cagttccttgtctgat

SEQ ID NO: 1435 - DNA, 16 bp, Artificial Sequence
  Description of Artificial Sequence: Synthetic oligonucleotide
tcagttccttgtctga

SEQ ID NO: 1436 - DNA, 16 bp, Artificial Sequence
  Description of Artificial Sequence: Synthetic oligonucleotide
atcagttccttgtctg

SEQ ID NO: 1437 - DNA, 16 bp, Artificial Sequence
  Description of Artificial Sequence: Synthetic oligonucleotide
aatcagttccttgtct

SEQ ID NO: 1438 - DNA, 16 bp, Artificial Sequence
  Description of Artificial Sequence: Synthetic oligonucleotide
taatcagttccttgtc

SEQ ID NO: 1439 - DNA, 16 bp, Artificial Sequence
  Description of Artificial Sequence: Synthetic oligonucleotide
gtaatcagttccttgt

SEQ ID NO: 1440 - DNA, 16 bp, Artificial Sequence
  Description of Artificial Sequence: Synthetic oligonucleotide
tgtaatcagttccttg

SEQ ID NO: 1441 - DNA, 16 bp, Artificial Sequence
  Description of Artificial Sequence: Synthetic oligonucleotide
ttgtaatcagttcctt

SEQ ID NO: 1442 - DNA, 16 bp, Artificial Sequence
  Description of Artificial Sequence: Synthetic oligonucleotide
tttgtaatcagttcct

SEQ ID NO: 1443 - DNA, 16 bp, Artificial Sequence
  Description of Artificial Sequence: Synthetic oligonucleotide
gtttgtaatcagttcc

SEQ ID NO: 1444 - DNA, 16 bp, Artificial Sequence
  Description of Artificial Sequence: Synthetic oligonucleotide
tgtttgtaatcagttc

SEQ ID NO: 1445 - DNA, 16 bp, Artificial Sequence
  Description of Artificial Sequence: Synthetic oligonucleotide
gtgcaatttgcggcca

SEQ ID NO: 1446 - DNA, 16 bp, Artificial Sequence
  Description of Artificial Sequence: Synthetic oligonucleotide
tgtgcaatttgcggcc

SEQ ID NO: 1447 - DNA, 16 bp, Artificial Sequence
  Description of Artificial Sequence: Synthetic oligonucleotide
ttgtgcaatttgcggc

SEQ ID NO: 1448 - DNA, 16 bp, Artificial Sequence
  Description of Artificial Sequence: Synthetic oligonucleotide
attgtgcaatttgcgg

SEQ ID NO: 1449 - DNA, 16 bp, Artificial Sequence
  Description of Artificial Sequence: Synthetic oligonucleotide
aattgtgcaatttgcg

SEQ ID NO: 1450 - DNA, 16 bp, Artificial Sequence
  Description of Artificial Sequence: Synthetic oligonucleotide
aaattgtgcaatttgc

SEQ ID NO: 1451 - DNA, 16 bp, Artificial Sequence
  Description of Artificial Sequence: Synthetic oligonucleotide
caaattgtgcaatttg

SEQ ID NO: 1452 - DNA, 16 bp, Artificial Sequence
  Description of Artificial Sequence: Synthetic oligonucleotide
gcaaattgtgcaattt

SEQ ID NO: 1453 - DNA, 16 bp, Artificial Sequence
  Description of Artificial Sequence: Synthetic oligonucleotide
cttccatgccaatgcg

SEQ ID NO: 1454 - DNA, 16 bp, Artificial Sequence
  Description of Artificial Sequence: Synthetic oligonucleotide
acttccatgccaatgc

SEQ ID NO: 1455 - DNA, 16 bp, Artificial Sequence
  Description of Artificial Sequence: Synthetic oligonucleotide
gacttccatgccaatg

SEQ ID NO: 1456 - DNA, 16 bp, Artificial Sequence
  Description of Artificial Sequence: Synthetic oligonucleotide
tgacttccatgccaat

SEQ ID NO: 1457 - DNA, 16 bp, Artificial Sequence
  Description of Artificial Sequence: Synthetic oligonucleotide
gtgacttccatgccaa

SEQ ID NO: 1458 - DNA, 16 bp, Artificial Sequence
  Description of Artificial Sequence: Synthetic oligonucleotide
tgtgacttccatgcca

SEQ ID NO: 1459 - DNA, 16 bp, Artificial Sequence
  Description of Artificial Sequence: Synthetic oligonucleotide
gtgtgacttccatgcc

SEQ ID NO: 1460 - DNA, 16 bp, Artificial Sequence
  Description of Artificial Sequence: Synthetic oligonucleotide
ggtgtgacttccatgc

SEQ ID NO: 1461 - DNA, 16 bp, Artificial Sequence
  Description of Artificial Sequence: Synthetic oligonucleotide
aggtgtgacttccatg

SEQ ID NO: 1462 - DNA, 16 bp, Artificial Sequence
  Description of Artificial Sequence: Synthetic oligonucleotide
aaggtgtgacttccat

SEQ ID NO: 1463 - DNA, 16 bp, Artificial Sequence
  Description of Artificial Sequence: Synthetic oligonucleotide
gaaggtgtgacttcca

SEQ ID NO: 1464 - DNA, 16 bp, Artificial Sequence
  Description of Artificial Sequence: Synthetic oligonucleotide
cgaaggtgtgacttcc

SEQ ID NO: 1465 - DNA, 16 bp, Artificial Sequence
  Description of Artificial Sequence: Synthetic oligonucleotide
ccgaaggtgtgacttc

SEQ ID NO: 1466 - DNA, 16 bp, Artificial Sequence
  Description of Artificial Sequence: Synthetic oligonucleotide
cccgaaggtgtgactt

SEQ ID NO: 1467 - DNA, 16 bp, Artificial Sequence
  Description of Artificial Sequence: Synthetic oligonucleotide
tcccgaaggtgtgact

SEQ ID NO: 1468 - DNA, 16 bp, Artificial Sequence
  Description of Artificial Sequence: Synthetic oligonucleotide
ttcccgaaggtgtgac

SEQ ID NO: 1469 - DNA, 16 bp, Artificial Sequence
  Description of Artificial Sequence: Synthetic oligonucleotide
gttcccgaaggtgtga

SEQ ID NO: 1470 - DNA, 16 bp, Artificial Sequence
  Description of Artificial Sequence: Synthetic oligonucleotide
ctttgtcatccaattt

SEQ ID NO: 1471 - DNA, 16 bp, Artificial Sequence
  Description of Artificial Sequence: Synthetic oligonucleotide
tctttgtcatccaatt

SEQ ID NO: 1472 - DNA, 16 bp, Artificial Sequence
  Description of Artificial Sequence: Synthetic oligonucleotide
atctttgtcatccaat

SEQ ID NO: 1473 - DNA, 16 bp, Artificial Sequence
  Description of Artificial Sequence: Synthetic oligonucleotide
gatctttgtcatccaa

SEQ ID NO: 1474 - DNA, 16 bp, Artificial Sequence
  Description of Artificial Sequence: Synthetic oligonucleotide
ggatctttgtcatcca

SEQ ID NO: 1475 - DNA, 16 bp, Artificial Sequence
  Description of Artificial Sequence: Synthetic oligonucleotide
tggatctttgtcatcc

SEQ ID NO: 1476 - DNA, 16 bp, Artificial Sequence
  Description of Artificial Sequence: Synthetic oligonucleotide
ttttgtatgcgtcaat

SEQ ID NO: 1477 - DNA, 16 bp, Artificial Sequence
  Description of Artificial Sequence: Synthetic oligonucleotide
gttttgtatgcgtcaa

SEQ ID NO: 1478 - DNA, 16 bp, Artificial Sequence
  Description of Artificial Sequence: Synthetic oligonucleotide
tgttttgtatgcgtca

SEQ ID NO: 1479 - DNA, 16 bp, Artificial Sequence
  Description of Artificial Sequence: Synthetic oligonucleotide
atgttttgtatgcgtc

SEQ ID NO: 1480 - DNA, 16 bp, Artificial Sequence
  Description of Artificial Sequence: Synthetic oligonucleotide
aatgttttgtatgcgt

SEQ ID NO: 1481 - DNA, 16 bp, Artificial Sequence
  Description of Artificial Sequence: Synthetic oligonucleotide
gaatgttttgtatgcg

SEQ ID NO: 1482 - DNA, 16 bp, Artificial Sequence
  Description of Artificial Sequence: Synthetic oligonucleotide
ggaatgttttgtatgc

SEQ ID NO: 1483 - DNA, 16 bp, Artificial Sequence
  Description of Artificial Sequence: Synthetic oligonucleotide
gggaatgttttgtatg

SEQ ID NO: 1484 - DNA, 16 bp, Artificial Sequence
  Description of Artificial Sequence: Synthetic oligonucleotide
tgggaatgttttgtat

SEQ ID NO: 1485 - DNA, 16 bp, Artificial Sequence
  Description of Artificial Sequence: Synthetic oligonucleotide
gtgggaatgttttgta

SEQ ID NO: 1486 - DNA, 16 bp, Artificial Sequence
  Description of Artificial Sequence: Synthetic oligonucleotide
ggtgggaatgttttgt

SEQ ID NO: 1487 - DNA, 16 bp, Artificial Sequence
  Description of Artificial Sequence: Synthetic oligonucleotide
tggtgggaatgttttg

SEQ ID NO: 1488 - DNA, 16 bp, Artificial Sequence
  Description of Artificial Sequence: Synthetic oligonucleotide
ttggtgggaatgtttt

SEQ ID NO: 1489 - DNA, 16 bp, Artificial Sequence
  Description of Artificial Sequence: Synthetic oligonucleotide
gttggtgggaatgttt

SEQ ID NO: 1490 - DNA, 16 bp, Artificial Sequence
  Description of Artificial Sequence: Synthetic oligonucleotide
tgttggtgggaatgtt

SEQ ID NO: 1491 - DNA, 16 bp, Artificial Sequence
  Description of Artificial Sequence: Synthetic oligonucleotide
ctgttggtgggaatgt

SEQ ID NO: 1492 - DNA, 16 bp, Artificial Sequence
  Description of Artificial Sequence: Synthetic oligonucleotide
tctgttggtgggaatg

SEQ ID NO: 1493 - DNA, 16 bp, Artificial Sequence
  Description of Artificial Sequence: Synthetic oligonucleotide
ctctgttggtgggaat

SEQ ID NO: 1494 - DNA, 16 bp, Artificial Sequence
  Description of Artificial Sequence: Synthetic oligonucleotide
gctctgttggtgggaa

SEQ ID NO: 1495 - DNA, 16 bp, Artificial Sequence
  Description of Artificial Sequence: Synthetic oligonucleotide
ggctctgttggtggga

SEQ ID NO: 1496 - DNA, 16 bp, Artificial Sequence
  Description of Artificial Sequence: Synthetic oligonucleotide
aggctctgttggtggg

SEQ ID NO: 1497 - DNA, 16 bp, Artificial Sequence
  Description of Artificial Sequence: Synthetic oligonucleotide
taggctctgttggtgg

SEQ ID NO: 1498 - DNA, 16 bp, Artificial Sequence
  Description of Artificial Sequence: Synthetic oligonucleotide
ttaggctctgttggtg

SEQ ID NO: 1499 - DNA, 16 bp, Artificial Sequence
  Description of Artificial Sequence: Synthetic oligonucleotide
tttaggctctgttggt

SEQ ID NO: 1500 - DNA, 16 bp, Artificial Sequence
  Description of Artificial Sequence: Synthetic oligonucleotide
ttttaggctctgttgg

SEQ ID NO: 1501 - DNA, 16 bp, Artificial Sequence
  Description of Artificial Sequence: Synthetic oligonucleotide
tttttaggctctgttg

SEQ ID NO: 1502 - DNA, 16 bp, Artificial Sequence
  Description of Artificial Sequence: Synthetic oligonucleotide
ctttttaggctctgtt

SEQ ID NO: 1503 - DNA, 16 bp, Artificial Sequence
  Description of Artificial Sequence: Synthetic oligonucleotide
cctttttaggctctgt

SEQ ID NO: 1504 - DNA, 16 bp, Artificial Sequence
  Description of Artificial Sequence: Synthetic oligonucleotide
tcctttttaggctctg

SEQ ID NO: 1505 - DNA, 16 bp, Artificial Sequence
  Description of Artificial Sequence: Synthetic oligonucleotide
gtcctttttaggctct

SEQ ID NO: 1506 - DNA, 16 bp, Artificial Sequence
  Description of Artificial Sequence: Synthetic oligonucleotide
tgtcctttttaggctc

SEQ ID NO: 1507 - DNA, 16 bp, Artificial Sequence
  Description of Artificial Sequence: Synthetic oligonucleotide
ttgtcctttttaggct

SEQ ID NO: 1508 - DNA, 16 bp, Artificial Sequence
  Description of Artificial Sequence: Synthetic oligonucleotide
tttgtcctttttaggc

SEQ ID NO: 1509 - DNA, 16 bp, Artificial Sequence
  Description of Artificial Sequence: Synthetic oligonucleotide
ttttgtcctttttagg

SEQ ID NO: 1510 - DNA, 16 bp, Artificial Sequence
  Description of Artificial Sequence: Synthetic oligonucleotide
tttttgtcctttttag

SEQ ID NO: 1511 - DNA, 16 bp, Artificial Sequence
  Description of Artificial Sequence: Synthetic oligonucleotide
ctttttgtccttttta

SEQ ID NO: 1512 - DNA, 16 bp, Artificial Sequence
  Description of Artificial Sequence: Synthetic oligonucleotide
tctttttgtccttttt

SEQ ID NO: 1513 - DNA, 16 bp, Artificial Sequence
  Description of Artificial Sequence: Synthetic oligonucleotide
ttctttttgtcctttt

SEQ ID NO: 1514 - DNA, 16 bp, Artificial Sequence
  Description of Artificial Sequence: Synthetic oligonucleotide
gaagaagagtcacagt

SEQ ID NO: 1515 - DNA, 16 bp, Artificial Sequence
  Description of Artificial Sequence: Synthetic oligonucleotide
ggaagaagagtcacag

SEQ ID NO: 1516 - DNA, 16 bp, Artificial Sequence
  Description of Artificial Sequence: Synthetic oligonucleotide
aggaagaagagtcaca

SEQ ID NO: 1517 - DNA, 16 bp, Artificial Sequence
  Description of Artificial Sequence: Synthetic oligonucleotide
caggaagaagagtcac

SEQ ID NO: 1518 - DNA, 16 bp, Artificial Sequence
  Description of Artificial Sequence: Synthetic oligonucleotide
gcaggaagaagagtca

SEQ ID NO: 1519 - DNA, 16 bp, Artificial Sequence
  Description of Artificial Sequence: Synthetic oligonucleotide
tctgccttgtgtggtc

SEQ ID NO: 1520 - DNA, 16 bp, Artificial Sequence
  Description of Artificial Sequence: Synthetic oligonucleotide
atctgccttgtgtggt

SEQ ID NO: 1521 - DNA, 16 bp, Artificial Sequence
  Description of Artificial Sequence: Synthetic oligonucleotide
catctgccttgtgtgg

SEQ ID NO: 1522 - DNA, 16 bp, Artificial Sequence
  Description of Artificial Sequence: Synthetic oligonucleotide
ccatctgccttgtgtg

SEQ ID NO: 1523 - DNA, 16 bp, Artificial Sequence
  Description of Artificial Sequence: Synthetic oligonucleotide
cccatctgccttgtgt

SEQ ID NO: 1524 - DNA, 16 bp, Artificial Sequence
  Description of Artificial Sequence: Synthetic oligonucleotide
gcccatctgccttgtg

SEQ ID NO: 1525 - DNA, 16 bp, Artificial Sequence
  Description of Artificial Sequence: Synthetic oligonucleotide
agcccatctgccttgt

SEQ ID NO: 1526 - DNA, 16 bp, Artificial Sequence
  Description of Artificial Sequence: Synthetic oligonucleotide
tagcccatctgccttg

SEQ ID NO: 1527 - DNA, 16 bp, Artificial Sequence
  Description of Artificial Sequence: Synthetic oligonucleotide
atagcccatctgcctt

SEQ ID NO: 1528 - DNA, 16 bp, Artificial Sequence
  Description of Artificial Sequence: Synthetic oligonucleotide
cacaagagtagactat

SEQ ID NO: 1529 - DNA, 16 bp, Artificial Sequence
  Description of Artificial Sequence: Synthetic oligonucleotide
gcacaagagtagacta

SEQ ID NO: 1530 - DNA, 16 bp, Artificial Sequence
  Description of Artificial Sequence: Synthetic oligonucleotide
tgcacaagagtagact

SEQ ID NO: 1531 - DNA, 16 bp, Artificial Sequence
  Description of Artificial Sequence: Synthetic oligonucleotide
ctgcacaagagtagac

SEQ ID NO: 1532 - DNA, 16 bp, Artificial Sequence
  Description of Artificial Sequence: Synthetic oligonucleotide
tctgcacaagagtaga

SEQ ID NO: 1533 - DNA, 16 bp, Artificial Sequence
  Description of Artificial Sequence: Synthetic oligonucleotide
ttctgcacaagagtag

SEQ ID NO: 1534 - DNA, 16 bp, Artificial Sequence
  Description of Artificial Sequence: Synthetic oligonucleotide
attctgcacaagagta

SEQ ID NO: 1535 - DNA, 16 bp, Artificial Sequence
  Description of Artificial Sequence: Synthetic oligonucleotide
cattctgcacaagagt

SEQ ID NO: 1536 - DNA, 16 bp, Artificial Sequence
  Description of Artificial Sequence: Synthetic oligonucleotide
tcattctgcacaagag

SEQ ID NO: 1537 - DNA, 16 bp, Artificial Sequence
  Description of Artificial Sequence: Synthetic oligonucleotide
ttcattctgcacaaga

SEQ ID NO: 1538 - DNA, 16 bp, Artificial Sequence
  Description of Artificial Sequence: Synthetic oligonucleotide
attcattctgcacaag

SEQ ID NO: 1539 - DNA, 16 bp, Artificial Sequence
  Description of Artificial Sequence: Synthetic oligonucleotide
aattcattctgcacaa

SEQ ID NO: 1540 - DNA, 16 bp, Artificial Sequence
  Description of Artificial Sequence: Synthetic oligonucleotide
gaattcattctgcaca

SEQ ID NO: 1541 - DNA, 16 bp, Artificial Sequence
  Description of Artificial Sequence: Synthetic oligonucleotide
agaattcattctgcac

SEQ ID NO: 1542 - DNA, 16 bp, Artificial Sequence
  Description of Artificial Sequence: Synthetic oligonucleotide
gagaattcattctgca

SEQ ID NO: 1543 - DNA, 16 bp, Artificial Sequence
  Description of Artificial Sequence: Synthetic oligonucleotide
cgagaattcattctgc

SEQ ID NO: 1544 - DNA, 16 bp, Artificial Sequence
  Description of Artificial Sequence: Synthetic oligonucleotide
acgagaattcattctg

SEQ ID NO: 1545 - DNA, 16 bp, Artificial Sequence
  Description of Artificial Sequence: Synthetic oligonucleotide
tacgagaattcattct

SEQ ID NO: 1546 - DNA, 16 bp, Artificial Sequence
  Description of Artificial Sequence: Synthetic oligonucleotide
agattaaagttaacta

SEQ ID NO: 1547 - DNA, 16 bp, Artificial Sequence
  Description of Artificial Sequence: Synthetic oligonucleotide
gagattaaagttaact

SEQ ID NO: 1548 - DNA, 16 bp, Artificial Sequence
  Description of Artificial Sequence: Synthetic oligonucleotide
tgagattaaagttaac

SEQ ID NO: 1549 - DNA, 16 bp, Artificial Sequence
  Description of Artificial Sequence: Synthetic oligonucleotide
gtgagattaaagttaa

SEQ ID NO: 1550 - DNA, 16 bp, Artificial Sequence
  Description of Artificial Sequence: Synthetic oligonucleotide
tgtgagattaaagtta

SEQ ID NO: 1551 - DNA, 16 bp, Artificial Sequence
  Description of Artificial Sequence: Synthetic oligonucleotide
atgtgagattaaagtt

SEQ ID NO: 1552 - DNA, 16 bp, Artificial Sequence
  Description of Artificial Sequence: Synthetic oligonucleotide
tatgtgagattaaagt

SEQ ID NO: 1553 - DNA, 16 bp, Artificial Sequence
  Description of Artificial Sequence: Synthetic oligonucleotide
ctatgtgagattaaag

SEQ ID NO: 1554 - DNA, 16 bp, Artificial Sequence
  Description of Artificial Sequence: Synthetic oligonucleotide
gctatgtgagattaaa

SEQ ID NO: 1555 - DNA, 16 bp, Artificial Sequence
  Description of Artificial Sequence: Synthetic oligonucleotide
tgctatgtgagattaa

SEQ ID NO: 1556 - DNA, 16 bp, Artificial Sequence
  Description of Artificial Sequence: Synthetic oligonucleotide
ttgctatgtgagatta

SEQ ID NO: 1557 - DNA, 16 bp, Artificial Sequence
  Description of Artificial Sequence: Synthetic oligonucleotide
attgctatgtgagatt

SEQ ID NO: 1558 - DNA, 16 bp, Artificial Sequence
  Description of Artificial Sequence: Synthetic oligonucleotide
gattgctatgtgagat

SEQ ID NO: 1559 - DNA, 16 bp, Artificial Sequence
  Description of Artificial Sequence: Synthetic oligonucleotide
agattgctatgtgaga

SEQ ID NO: 1560 - DNA, 16 bp, Artificial Sequence
  Description of Artificial Sequence: Synthetic oligonucleotide
aagattgctatgtgag

SEQ ID NO: 1561 - DNA, 16 bp, Artificial Sequence
  Description of Artificial Sequence: Synthetic oligonucleotide
aaagattgctatgtga

SEQ ID NO: 1562 - DNA, 16 bp, Artificial Sequence
  Description of Artificial Sequence: Synthetic oligonucleotide
taaagattgctatgtg

SEQ ID NO: 1563 - DNA, 16 bp, Artificial Sequence
  Description of Artificial Sequence: Synthetic oligonucleotide
ttaaagattgctatgt

SEQ ID NO: 1564 - DNA, 16 bp, Artificial Sequence
  Description of Artificial Sequence: Synthetic oligonucleotide
attaaagattgctatg

SEQ ID NO: 1565 - DNA, 16 bp, Artificial Sequence
  Description of Artificial Sequence: Synthetic oligonucleotide
gattaaagattgctat

SEQ ID NO: 1566 - DNA, 16 bp, Artificial Sequence
  Description of Artificial Sequence: Synthetic oligonucleotide
tgattaaagattgcta

SEQ ID NO: 1567 - DNA, 16 bp, Artificial Sequence
  Description of Artificial Sequence: Synthetic oligonucleotide
tccctaatgttacaca

SEQ ID NO: 1568 - DNA, 16 bp, Artificial Sequence
  Description of Artificial Sequence: Synthetic oligonucleotide
ctccctaatgttacac

SEQ ID NO: 1569 - DNA, 16 bp, Artificial Sequence
  Description of Artificial Sequence: Synthetic oligonucleotide
cctccctaatgttaca

SEQ ID NO: 1570 - DNA, 16 bp, Artificial Sequence
  Description of Artificial Sequence: Synthetic oligonucleotide
tcctccctaatgttac

SEQ ID NO: 1571 - DNA, 16 bp, Artificial Sequence
  Description of Artificial Sequence: Synthetic oligonucleotide
gtcctccctaatgtta

SEQ ID NO: 1572 - DNA, 16 bp, Artificial Sequence
  Description of Artificial Sequence: Synthetic oligonucleotide
agtcctccctaatgtt

SEQ ID NO: 1573 - DNA, 16 bp, Artificial Sequence
  Description of Artificial Sequence: Synthetic oligonucleotide
aagtcctccctaatgt

SEQ ID NO: 1574 - DNA, 16 bp, Artificial Sequence
  Description of Artificial Sequence: Synthetic oligonucleotide
caagtcctccctaatg

SEQ ID NO: 1575 - DNA, 16 bp, Artificial Sequence
  Description of Artificial Sequence: Synthetic oligonucleotide
tcaagtcctccctaat

SEQ ID NO: 1576 - DNA, 16 bp, Artificial Sequence
  Description of Artificial Sequence: Synthetic oligonucleotide
ttcaagtcctccctaa

SEQ ID NO: 1577 - DNA, 16 bp, Artificial Sequence
  Description of Artificial Sequence: Synthetic oligonucleotide
tttcaagtcctcccta

SEQ ID NO: 1578 - DNA, 16 bp, Artificial Sequence
  Description of Artificial Sequence: Synthetic oligonucleotide
ctttcaagtcctccct

SEQ ID NO: 1579 - DNA, 16 bp, Artificial Sequence
  Description of Artificial Sequence: Synthetic oligonucleotide
tctttcaagtcctccc

SEQ ID NO: 1580 - DNA, 16 bp, Artificial Sequence
  Description of Artificial Sequence: Synthetic oligonucleotide
ctctttcaagtcctcc

SEQ ID NO: 1581 - DNA, 16 bp, Artificial Sequence
  Description of Artificial Sequence: Synthetic oligonucleotide
gctctttcaagtcctc

SEQ ID NO: 1582 - DNA, 16 bp, Artificial Sequence
  Description of Artificial Sequence: Synthetic oligonucleotide
ggctctttcaagtcct

SEQ ID NO: 1583 - DNA, 16 bp, Artificial Sequence
  Description of Artificial Sequence: Synthetic oligonucleotide
tggctctttcaagtcc

SEQ ID NO: 1584 - DNA, 16 bp, Artificial Sequence
  Description of Artificial Sequence: Synthetic oligonucleotide
gtggctctttcaagtc

SEQ ID NO: 1585 - DNA, 16 bp, Artificial Sequence
  Description of Artificial Sequence: Synthetic oligonucleotide
ggtggctctttcaagt

SEQ ID NO: 1586 - DNA, 16 bp, Artificial Sequence
  Description of Artificial Sequence: Synthetic oligonucleotide
tggtggctctttcaag

SEQ ID NO: 1587 - DNA, 16 bp, Artificial Sequence
  Description of Artificial Sequence: Synthetic oligonucleotide
gtggtggctctttcaa

SEQ ID NO: 1588 - DNA, 16 bp, Artificial Sequence
  Description of Artificial Sequence: Synthetic oligonucleotide
tgtggtggctctttca

SEQ ID NO: 1589 - DNA, 16 bp, Artificial Sequence
  Description of Artificial Sequence: Synthetic oligonucleotide
atgtggtggctctttc

SEQ ID NO: 1590 - DNA, 16 bp, Artificial Sequence
  Description of Artificial Sequence: Synthetic oligonucleotide
aatgtggtggctcttt

SEQ ID NO: 1591 - DNA, 16 bp, Artificial Sequence
  Description of Artificial Sequence: Synthetic oligonucleotide
aaatgtggtggctctt

SEQ ID NO: 1592 - DNA, 16 bp, Artificial Sequence
  Description of Artificial Sequence: Synthetic oligonucleotide
aaaatgtggtggctct

SEQ ID NO: 1593 - DNA, 16 bp, Artificial Sequence
  Description of Artificial Sequence: Synthetic oligonucleotide
gaaaatgtggtggctc

SEQ ID NO: 1594 - DNA, 16 bp, Artificial Sequence
  Description of Artificial Sequence: Synthetic oligonucleotide
tgaaaatgtggtggct

SEQ ID NO: 1595 - DNA, 16 bp, Artificial Sequence
  Description of Artificial Sequence: Synthetic oligonucleotide
actccgcgtggcctcg

SEQ ID NO: 1596 - DNA, 16 bp, Artificial Sequence
  Description of Artificial Sequence: Synthetic oligonucleotide
tactccgcgtggcctc

SEQ ID NO: 1597 - DNA, 16 bp, Artificial Sequence
  Description of Artificial Sequence: Synthetic oligonucleotide
gtactccgcgtggcct

SEQ ID NO: 1598 - DNA, 16 bp, Artificial Sequence
  Description of Artificial Sequence: Synthetic oligonucleotide
cgtactccgcgtggcc

SEQ ID NO: 1599 - DNA, 16 bp, Artificial Sequence
  Description of Artificial Sequence: Synthetic oligonucleotide
tcgtactccgcgtggc

SEQ ID NO: 1600 - DNA, 16 bp, Artificial Sequence
  Description of Artificial Sequence: Synthetic oligonucleotide
atcgtactccgcgtgg

SEQ ID NO: 1601 - DNA, 16 bp, Artificial Sequence
  Description of Artificial Sequence: Synthetic oligonucleotide
gatcgtactccgcgtg

SEQ ID NO: 1602 - DNA, 16 bp, Artificial Sequence
  Description of Artificial Sequence: Synthetic oligonucleotide
cgatcgtactccgcgt

SEQ ID NO: 1603 - DNA, 16 bp, Artificial Sequence
  Description of Artificial Sequence: Synthetic oligonucleotide
tcgatcgtactccgcg

SEQ ID NO: 1604 - DNA, 16 bp, Artificial Sequence
  Description of Artificial Sequence: Synthetic oligonucleotide
ctcgatcgtactccgc

SEQ ID NO: 1605 - DNA, 16 bp, Artificial Sequence
  Description of Artificial Sequence: Synthetic oligonucleotide
agctctccctagcatt

SEQ ID NO: 1606 - DNA, 16 bp, Artificial Sequence
  Description of Artificial Sequence: Synthetic oligonucleotide
cagctctccctagcat

SEQ ID NO: 1607 - DNA, 16 bp, Artificial Sequence
  Description of Artificial Sequence: Synthetic oligonucleotide
gcagctctccctagca

SEQ ID NO: 1608 - DNA, 16 bp, Artificial Sequence
  Description of Artificial Sequence: Synthetic oligonucleotide
ggcagctctccctagc

SEQ ID NO: 1609 - DNA, 16 bp, Artificial Sequence
  Description of Artificial Sequence: Synthetic oligonucleotide
aggcagctctccctag

SEQ ID NO: 1610 - DNA, 16 bp, Artificial Sequence
  Description of Artificial Sequence: Synthetic oligonucleotide
taggcagctctcccta

SEQ ID NO: 1611 - DNA, 16 bp, Artificial Sequence
  Description of Artificial Sequence: Synthetic oligonucleotide
ataggcagctctccct

SEQ ID NO: 1612 - DNA, 16 bp, Artificial Sequence
  Description of Artificial Sequence: Synthetic oligonucleotide
tataggcagctctccc

SEQ ID NO: 1613 - DNA, 16 bp, Artificial Sequence
  Description of Artificial Sequence: Synthetic oligonucleotide
atataggcagctctcc

SEQ ID NO: 1614 - DNA, 16 bp, Artificial Sequence
  Description of Artificial Sequence: Synthetic oligonucleotide
catataggcagctctc

SEQ ID NO: 1615 - DNA, 16 bp, Artificial Sequence
  Description of Artificial Sequence: Synthetic oligonucleotide
ccatataggcagctct

SEQ ID NO: 1616 - DNA, 16 bp, Artificial Sequence
  Description of Artificial Sequence: Synthetic oligonucleotide
tccatataggcagctc

SEQ ID NO: 1617 - DNA, 16 bp, Artificial Sequence
  Description of Artificial Sequence: Synthetic oligonucleotide
ttccatataggcagct

SEQ ID NO: 1618 - DNA, 16 bp, Artificial Sequence
  Description of Artificial Sequence: Synthetic oligonucleotide
cttccatataggcagc

SEQ ID NO: 1619 - DNA, 16 bp, Artificial Sequence
  Description of Artificial Sequence: Synthetic oligonucleotide
tcttccatataggcag

SEQ ID NO: 1620 - DNA, 16 bp, Artificial Sequence
  Description of Artificial Sequence: Synthetic oligonucleotide
ctcttccatataggca

SEQ ID NO: 1621 - DNA, 16 bp, Artificial Sequence
  Description of Artificial Sequence: Synthetic oligonucleotide
gctcttccatataggc

SEQ ID NO: 1622 - DNA, 16 bp, Artificial Sequence
  Description of Artificial Sequence: Synthetic oligonucleotide
ggctcttccatatagg

SEQ ID NO: 1623 - DNA, 16 bp, Artificial Sequence
  Description of Artificial Sequence: Synthetic oligonucleotide
gggctcttccatatag

SEQ ID NO: 1624 - DNA, 16 bp, Artificial Sequence
  Description of Artificial Sequence: Synthetic oligonucleotide
agggctcttccatata

SEQ ID NO: 1625 - DNA, 16 bp, Artificial Sequence
  Description of Artificial Sequence: Synthetic oligonucleotide
tagggctcttccatat

SEQ ID NO: 1626 - DNA, 16 bp, Artificial Sequence
  Description of Artificial Sequence: Synthetic oligonucleotide
ttagggctcttccata

SEQ ID NO: 1627 - DNA, 16 bp, Artificial Sequence
  Description of Artificial Sequence: Synthetic oligonucleotide
attagggctcttccat

SEQ ID NO: 1628 - DNA, 16 bp, Artificial Sequence
  Description of Artificial Sequence: Synthetic oligonucleotide
cattagggctcttcca

SEQ ID NO: 1629 - DNA, 16 bp, Artificial Sequence
  Description of Artificial Sequence: Synthetic oligonucleotide
acattagggctcttcc

SEQ ID NO: 1630 - DNA, 16 bp, Artificial Sequence
  Description of Artificial Sequence: Synthetic oligonucleotide
cacattagggctcttc

SEQ ID NO: 1631 - DNA, 16 bp, Artificial Sequence
  Description of Artificial Sequence: Synthetic oligonucleotide
acacattagggctctt

SEQ ID NO: 1632 - DNA, 16 bp, Artificial Sequence
  Description of Artificial Sequence: Synthetic oligonucleotide
tacacattagggctct

SEQ ID NO: 1633 - DNA, 16 bp, Artificial Sequence
  Description of Artificial Sequence: Synthetic oligonucleotide
ttacacattagggctc

SEQ ID NO: 1634 - DNA, 16 bp, Artificial Sequence
  Description of Artificial Sequence: Synthetic oligonucleotide
tttacacattagggct

SEQ ID NO: 1635 - DNA, 16 bp, Artificial Sequence
  Description of Artificial Sequence: Synthetic oligonucleotide
ttttacacattagggc

SEQ ID NO: 1636 - DNA, 16 bp, Artificial Sequence
  Description of Artificial Sequence: Synthetic oligonucleotide
attttacacattaggg

SEQ ID NO: 1637 - DNA, 16 bp, Artificial Sequence
  Description of Artificial Sequence: Synthetic oligonucleotide
aattttacacattagg

SEQ ID NO: 1638 - DNA, 16 bp, Artificial Sequence
  Description of Artificial Sequence: Synthetic oligonucleotide
taattttacacattag

SEQ ID NO: 1639 - DNA, 16 bp, Artificial Sequence
  Description of Artificial Sequence: Synthetic oligonucleotide
ttaattttacacatta

SEQ ID NO: 1640 - DNA, 16 bp, Artificial Sequence
  Description of Artificial Sequence: Synthetic oligonucleotide
attaattttacacatt

SEQ ID NO: 1641 - DNA, 16 bp, Artificial Sequence
  Description of Artificial Sequence: Synthetic oligonucleotide
aattaattttacacat

SEQ ID NO: 1642 - DNA, 16 bp, Artificial Sequence
  Description of Artificial Sequence: Synthetic oligonucleotide
aaattaattttacaca

SEQ ID NO: 1643 - DNA, 16 bp, Artificial Sequence
  Description of Artificial Sequence: Synthetic oligonucleotide
aaaattaattttacac

SEQ ID NO: 1644 - DNA, 16 bp, Artificial Sequence
  Description of Artificial Sequence: Synthetic oligonucleotide
taaaattaattttaca

SEQ ID NO: 1645 - DNA, 16 bp, Artificial Sequence
  Description of Artificial Sequence: Synthetic oligonucleotide
ctaaaattaattttac

SEQ ID NO: 1646 - DNA, 16 bp, Artificial Sequence
  Description of Artificial Sequence: Synthetic oligonucleotide
actaaaattaatttta

SEQ ID NO: 1647 - DNA, 16 bp, Artificial Sequence
  Description of Artificial Sequence: Synthetic oligonucleotide
tactaaaattaatttt

SEQ ID NO: 1648 - DNA, 16 bp, Artificial Sequence
  Description of Artificial Sequence: Synthetic oligonucleotide
ctactaaaattaattt

SEQ ID NO: 1649 - DNA, 17 bp, Artificial Sequence
  Description of Artificial Sequence: Synthetic oligonucleotide
tgtcaacgacagtaatt

SEQ ID NO: 1650 - DNA, 17 bp, Artificial Sequence
  Description of Artificial Sequence: Synthetic oligonucleotide
gacgaaaccgtaagcag

SEQ ID NO: 1651 - DNA, 17 bp, Artificial Sequence
  Description of Artificial Sequence: Synthetic oligonucleotide
ggacgaaaccgtaagca

SEQ ID NO: 1652 - DNA, 17 bp, Artificial Sequence
  Description of Artificial Sequence: Synthetic oligonucleotide
cggacgaaaccgtaagc

SEQ ID NO: 1653 - DNA, 17 bp, Artificial Sequence
  Description of Artificial Sequence: Synthetic oligonucleotide
acggacgaaaccgtaag

SEQ ID NO: 1654 - DNA, 17 bp, Artificial Sequence
  Description of Artificial Sequence: Synthetic oligonucleotide
cacggacgaaaccgtaa

SEQ ID NO: 1655 - DNA, 17 bp, Artificial Sequence
  Description of Artificial Sequence: Synthetic oligonucleotide
acacggacgaaaccgta

SEQ ID NO: 1656 - DNA, 17 bp, Artificial Sequence
  Description of Artificial Sequence: Synthetic oligonucleotide
aacacggacgaaaccgt

SEQ ID NO: 1657 - DNA, 17 bp, Artificial Sequence
  Description of Artificial Sequence: Synthetic oligonucleotide
caacacggacgaaaccg

SEQ ID NO: 1658 - DNA, 17 bp, Artificial Sequence
  Description of Artificial Sequence: Synthetic oligonucleotide
gcaacacggacgaaacc

SEQ ID NO: 1659 - DNA, 17 bp, Artificial Sequence
  Description of Artificial Sequence: Synthetic oligonucleotide
tgcaacacggacgaaac

SEQ ID NO: 1660 - DNA, 17 bp, Artificial Sequence
  Description of Artificial Sequence: Synthetic oligonucleotide
ctgcaacacggacgaaa

SEQ ID NO: 1661 - DNA, 17 bp, Artificial Sequence
  Description of Artificial Sequence: Synthetic oligonucleotide
acccggacgaaacctag

SEQ ID NO: 1662 - DNA, 17 bp, Artificial Sequence
  Description of Artificial Sequence: Synthetic oligonucleotide
cacccggacgaaaccta

SEQ ID NO: 1663 - DNA, 17 bp, Artificial Sequence
  Description of Artificial Sequence: Synthetic oligonucleotide
acacccggacgaaacct

SEQ ID NO: 1664 - DNA, 17 bp, Artificial Sequence
  Description of Artificial Sequence: Synthetic oligonucleotide
cacacccggacgaaacc

SEQ ID NO: 1665 - DNA, 17 bp, Artificial Sequence
  Description of Artificial Sequence: Synthetic oligonucleotide
tcacacccggacgaaac

SEQ ID NO: 1666 - DNA, 17 bp, Artificial Sequence
  Description of Artificial Sequence: Synthetic oligonucleotide
gtcacacccggacgaaa

SEQ ID NO: 1667 - DNA, 17 bp, Artificial Sequence
  Description of Artificial Sequence: Synthetic oligonucleotide
ggtcacacccggacgaa

SEQ ID NO: 1668 - DNA, 17 bp, Artificial Sequence
  Description of Artificial Sequence: Synthetic oligonucleotide
cggtcacacccggacga

SEQ ID NO: 1669 - DNA, 17 bp, Artificial Sequence
  Description of Artificial Sequence: Synthetic oligonucleotide
tcggtcacacccggacg

SEQ ID NO: 1670 - DNA, 17 bp, Artificial Sequence
  Description of Artificial Sequence: Synthetic oligonucleotide
ttcggtcacacccggac

SEQ ID NO: 1671 - DNA, 17 bp, Artificial Sequence
  Description of Artificial Sequence: Synthetic oligonucleotide
tttcggtcacacccgga

SEQ ID NO: 1672 - DNA, 17 bp, Artificial Sequence
  Description of Artificial Sequence: Synthetic oligonucleotide
ctttcggtcacacccgg

SEQ ID NO: 1673 - DNA, 17 bp, Artificial Sequence
  Description of Artificial Sequence: Synthetic oligonucleotide
cctttcggtcacacccg

SEQ ID NO: 1674 - DNA, 17 bp, Artificial Sequence
  Description of Artificial Sequence: Synthetic oligonucleotide
acctttcggtcacaccc

SEQ ID NO: 1675 - DNA, 17 bp, Artificial Sequence
  Description of Artificial Sequence: Synthetic oligonucleotide
tacctttcggtcacacc

SEQ ID NO: 1676 - DNA, 17 bp, Artificial Sequence
  Description of Artificial Sequence: Synthetic oligonucleotide
ttacctttcggtcacac

SEQ ID NO: 1677 - DNA, 17 bp, Artificial Sequence
  Description of Artificial Sequence: Synthetic oligonucleotide
cttacctttcggtcaca

SEQ ID NO: 1678 - DNA, 17 bp, Artificial Sequence
  Description of Artificial Sequence: Synthetic oligonucleotide
tcttacctttcggtcac

SEQ ID NO: 1679 - DNA, 17 bp, Artificial Sequence
  Description of Artificial Sequence: Synthetic oligonucleotide
atcttacctttcggtca

SEQ ID NO: 1680 - DNA, 17 bp, Artificial Sequence
  Description of Artificial Sequence: Synthetic oligonucleotide
catcttacctttcggtc

SEQ ID NO: 1681 - DNA, 17 bp, Artificial Sequence
  Description of Artificial Sequence: Synthetic oligonucleotide
ccatcttacctttcggt

SEQ ID NO: 1682 - DNA, 17 bp, Artificial Sequence
  Description of Artificial Sequence: Synthetic oligonucleotide
tccatcttacctttcgg

SEQ ID NO: 1683 - DNA, 17 bp, Artificial Sequence
  Description of Artificial Sequence: Synthetic oligonucleotide
ctccatcttacctttcg

SEQ ID NO: 1684 - DNA, 17 bp, Artificial Sequence
  Description of Artificial Sequence: Synthetic oligonucleotide
tctccatcttacctttc

SEQ ID NO: 1685 - DNA, 17 bp, Artificial Sequence
  Description of Artificial Sequence: Synthetic oligonucleotide
ctctccatcttaccttt

SEQ ID NO: 1686 - DNA, 17 bp, Artificial Sequence
  Description of Artificial Sequence: Synthetic oligonucleotide
gctctccatcttacctt

SEQ ID NO: 1687 - DNA, 17 bp, Artificial Sequence
  Description of Artificial Sequence: Synthetic oligonucleotide
ggctctccatcttacct

SEQ ID NO: 1688 - DNA, 17 bp, Artificial Sequence
  Description of Artificial Sequence: Synthetic oligonucleotide
aggctctccatcttacc

SEQ ID NO: 1689 - DNA, 17 bp, Artificial Sequence
  Description of Artificial Sequence: Synthetic oligonucleotide
aaggctctccatcttac

SEQ ID NO: 1690 - DNA, 17 bp, Artificial Sequence
  Description of Artificial Sequence: Synthetic oligonucleotide
caaggctctccatctta

SEQ ID NO: 1691 - DNA, 17 bp, Artificial Sequence
  Description of Artificial Sequence: Synthetic oligonucleotide
acaaggctctccatctt

SEQ ID NO: 1692 - DNA, 17 bp, Artificial Sequence
  Description of Artificial Sequence: Synthetic oligonucleotide
gtgtgttttctcgttga

SEQ ID NO: 1693 - DNA, 17 bp, Artificial Sequence
  Description of Artificial Sequence: Synthetic oligonucleotide
cgtgtgttttctcgttg

SEQ ID NO: 1694 - DNA, 17 bp, Artificial Sequence
  Description of Artificial Sequence: Synthetic oligonucleotide
acgtgtgttttctcgtt

SEQ ID NO: 1695 - DNA, 17 bp, Artificial Sequence
  Description of Artificial Sequence: Synthetic oligonucleotide
gacgtgtgttttctcgt

SEQ ID NO: 1696 - DNA, 17 bp, Artificial Sequence
  Description of Artificial Sequence: Synthetic oligonucleotide
ggacgtgtgttttctcg

SEQ ID NO: 1697 - DNA, 17 bp, Artificial Sequence
  Description of Artificial Sequence: Synthetic oligonucleotide
tggacgtgtgttttctc

SEQ ID NO: 1698 - DNA, 17 bp, Artificial Sequence
  Description of Artificial Sequence: Synthetic oligonucleotide
ttggacgtgtgttttct

SEQ ID NO: 1699 - DNA, 17 bp, Artificial Sequence
  Description of Artificial Sequence: Synthetic oligonucleotide
gttggacgtgtgttttc

SEQ ID NO: 1700 - DNA, 17 bp, Artificial Sequence
  Description of Artificial Sequence: Synthetic oligonucleotide
agttggacgtgtgtttt

SEQ ID NO: 1701 - DNA, 17 bp, Artificial Sequence
  Description of Artificial Sequence: Synthetic oligonucleotide
gagttggacgtgtgttt

SEQ ID NO: 1702 - DNA, 17 bp, Artificial Sequence
  Description of Artificial Sequence: Synthetic oligonucleotide
tgagttggacgtgtgtt

SEQ ID NO: 1703 - DNA, 17 bp, Artificial Sequence
  Description of Artificial Sequence: Synthetic oligonucleotide
ctgagttggacgtgtgt

SEQ ID NO: 1704 - DNA, 17 bp, Artificial Sequence
  Description of Artificial Sequence: Synthetic oligonucleotide
actgagttggacgtgtg

SEQ ID NO: 1705 - DNA, 17 bp, Artificial Sequence
  Description of Artificial Sequence: Synthetic oligonucleotide
aactgagttggacgtgt

SEQ ID NO: 1706 - DNA, 17 bp, Artificial Sequence
  Description of Artificial Sequence: Synthetic oligonucleotide
aaactgagttggacgtg

SEQ ID NO: 1707 - DNA, 17 bp, Artificial Sequence
  Description of Artificial Sequence: Synthetic oligonucleotide
caaactgagttggacgt

SEQ ID NO: 1708 - DNA, 17 bp, Artificial Sequence
  Description of Artificial Sequence: Synthetic oligonucleotide
gcaaactgagttggacg

SEQ ID NO: 1709 - DNA, 17 bp, Artificial Sequence
  Description of Artificial Sequence: Synthetic oligonucleotide
ggcaaactgagttggac

SEQ ID NO: 1710 - DNA, 17 bp, Artificial Sequence
  Description of Artificial Sequence: Synthetic oligonucleotide
aggcaaactgagttgga

SEQ ID NO: 1711 - DNA, 17 bp, Artificial Sequence
  Description of Artificial Sequence: Synthetic oligonucleotide
caggcaaactgagttgg

SEQ ID NO: 1712 - DNA, 17 bp, Artificial Sequence
  Description of Artificial Sequence: Synthetic oligonucleotide
acaggcaaactgagttg

SEQ ID NO: 1713 - DNA, 17 bp, Artificial Sequence
  Description of Artificial Sequence: Synthetic oligonucleotide
acatagggctgttcaag

SEQ ID NO: 1714 - DNA, 17 bp, Artificial Sequence
  Description of Artificial Sequence: Synthetic oligonucleotide
cacatagggctgttcaa

SEQ ID NO: 1715 - DNA, 17 bp, Artificial Sequence
  Description of Artificial Sequence: Synthetic oligonucleotide
acacatagggctgttca

SEQ ID NO: 1716 - DNA, 17 bp, Artificial Sequence
  Description of Artificial Sequence: Synthetic oligonucleotide
aacacatagggctgttc

SEQ ID NO: 1717 - DNA, 17 bp, Artificial Sequence
  Description of Artificial Sequence: Synthetic oligonucleotide
gaacacatagggctgtt

SEQ ID NO: 1718 - DNA, 17 bp, Artificial Sequence
  Description of Artificial Sequence: Synthetic oligonucleotide
tgaacacatagggctgt

SEQ ID NO: 1719 - DNA, 17 bp, Artificial Sequence
  Description of Artificial Sequence: Synthetic oligonucleotide
atgaacacatagggctg

SEQ ID NO: 1720 - DNA, 17 bp, Artificial Sequence
  Description of Artificial Sequence: Synthetic oligonucleotide
ttcttacgaagaagaac

SEQ ID NO: 1721 - DNA, 17 bp, Artificial Sequence
  Description of Artificial Sequence: Synthetic oligonucleotide
gttcttacgaagaagaa

SEQ ID NO: 1722 - DNA, 17 bp, Artificial Sequence
  Description of Artificial Sequence: Synthetic oligonucleotide
cgttcttacgaagaaga

SEQ ID NO: 1723 - DNA, 17 bp, Artificial Sequence
  Description of Artificial Sequence: Synthetic oligonucleotide
ccgttcttacgaagaag

SEQ ID NO: 1724 - DNA, 17 bp, Artificial Sequence
  Description of Artificial Sequence: Synthetic oligonucleotide
accgttcttacgaagaa

SEQ ID NO: 1725 - DNA, 17 bp, Artificial Sequence
  Description of Artificial Sequence: Synthetic oligonucleotide
taccgttcttacgaaga

SEQ ID NO: 1726 - DNA, 17 bp, Artificial Sequence
  Description of Artificial Sequence: Synthetic oligonucleotide
ttaccgttcttacgaag

SEQ ID NO: 1727 - DNA, 17 bp, Artificial Sequence
  Description of Artificial Sequence: Synthetic oligonucleotide
attaccgttcttacgaa

SEQ ID NO: 1728 - DNA, 17 bp, Artificial Sequence
  Description of Artificial Sequence: Synthetic oligonucleotide
tattaccgttcttacga

SEQ ID NO: 1729 - DNA, 17 bp, Artificial Sequence
  Description of Artificial Sequence: Synthetic oligonucleotide
ttattaccgttcttacg

SEQ ID NO: 1730 - DNA, 17 bp, Artificial Sequence
  Description of Artificial Sequence: Synthetic oligonucleotide
tcagtgccaagctcgtc

SEQ ID NO: 1731 - DNA, 17 bp, Artificial Sequence
  Description of Artificial Sequence: Synthetic oligonucleotide
atcagtgccaagctcgt

SEQ ID NO: 1732 - DNA, 17 bp, Artificial Sequence
  Description of Artificial Sequence: Synthetic oligonucleotide
gatcagtgccaagctcg

SEQ ID NO: 1733 - DNA, 17 bp, Artificial Sequence
  Description of Artificial Sequence: Synthetic oligonucleotide
ggatcagtgccaagctc

SEQ ID NO: 1734 - DNA, 17 bp, Artificial Sequence
  Description of Artificial Sequence: Synthetic oligonucleotide
aacacacagcctccaaa

SEQ ID NO: 1735 - DNA, 17 bp, Artificial Sequence
  Description of Artificial Sequence: Synthetic oligonucleotide
taagttttaaataacca

SEQ ID NO: 1736 - DNA, 17 bp, Artificial Sequence
  Description of Artificial Sequence: Synthetic oligonucleotide
gtaagttttaaataacc

SEQ ID NO: 1737 - DNA, 17 bp, Artificial Sequence
  Description of Artificial Sequence: Synthetic oligonucleotide
agtaagttttaaataac

SEQ ID NO: 1738 - DNA, 17 bp, Artificial Sequence
  Description of Artificial Sequence: Synthetic oligonucleotide
cagtaagttttaaataa

SEQ ID NO: 1739 - DNA, 17 bp, Artificial Sequence
  Description of Artificial Sequence: Synthetic oligonucleotide
tcagtaagttttaaata

SEQ ID NO: 1740 - DNA, 17 bp, Artificial Sequence
  Description of Artificial Sequence: Synthetic oligonucleotide
gtcagtaagttttaaat

SEQ ID NO: 1741 - DNA, 17 bp, Artificial Sequence
  Description of Artificial Sequence: Synthetic oligonucleotide
tgtcagtaagttttaaa

SEQ ID NO: 1742 - DNA, 17 bp, Artificial Sequence
  Description of Artificial Sequence: Synthetic oligonucleotide
ttgtcagtaagttttaa

SEQ ID NO: 1743 - DNA, 17 bp, Artificial Sequence
  Description of Artificial Sequence: Synthetic oligonucleotide
attgtcagtaagtttta

SEQ ID NO: 1744 - DNA, 17 bp, Artificial Sequence
  Description of Artificial Sequence: Synthetic oligonucleotide
cattgtcagtaagtttt

SEQ ID NO: 1745 - DNA, 17 bp, Artificial Sequence
  Description of Artificial Sequence: Synthetic oligonucleotide
acattgtcagtaagttt

SEQ ID NO: 1746 - DNA, 17 bp, Artificial Sequence
  Description of Artificial Sequence: Synthetic oligonucleotide
aacttagtttcttccag

SEQ ID NO: 1747 - DNA, 17 bp, Artificial Sequence
  Description of Artificial Sequence: Synthetic oligonucleotide
gcacaaaagttagcagc

SEQ ID NO: 1748 - DNA, 17 bp, Artificial Sequence
  Description of Artificial Sequence: Synthetic oligonucleotide
tgcacaaaagttagcag

SEQ ID NO: 1749 - DNA, 17 bp, Artificial Sequence
  Description of Artificial Sequence: Synthetic oligonucleotide
gtgcacaaaagttagca

SEQ ID NO: 1750 - DNA, 17 bp, Artificial Sequence
  Description of Artificial Sequence: Synthetic oligonucleotide
agtgcacaaaagttagc

SEQ ID NO: 1751 - DNA, 17 bp, Artificial Sequence
  Description of Artificial Sequence: Synthetic oligonucleotide
ccactacttcttcagag

SEQ ID NO: 1752 - DNA, 17 bp, Artificial Sequence
  Description of Artificial Sequence: Synthetic oligonucleotide
tccactacttcttcaga

SEQ ID NO: 1753 - DNA, 17 bp, Artificial Sequence
  Description of Artificial Sequence: Synthetic oligonucleotide
ttccactacttcttcag

SEQ ID NO: 1754 - DNA, 17 bp, Artificial Sequence
  Description of Artificial Sequence: Synthetic oligonucleotide
tttccactacttcttca

SEQ ID NO: 1755 - DNA, 17 bp, Artificial Sequence
  Description of Artificial Sequence: Synthetic oligonucleotide
ttttccactacttcttc

SEQ ID NO: 1756 - DNA, 17 bp, Artificial Sequence
  Description of Artificial Sequence: Synthetic oligonucleotide
attttccactacttctt

SEQ ID NO: 1757 - DNA, 17 bp, Artificial Sequence
  Description of Artificial Sequence: Synthetic oligonucleotide
gattttccactacttct

SEQ ID NO: 1758 - DNA, 17 bp, Artificial Sequence
  Description of Artificial Sequence: Synthetic oligonucleotide
ggattttccactacttc

SEQ ID NO: 1759 - DNA, 17 bp, Artificial Sequence
  Description of Artificial Sequence: Synthetic oligonucleotide
aggattttccactactt

SEQ ID NO: 1760 - DNA, 17 bp, Artificial Sequence
  Description of Artificial Sequence: Synthetic oligonucleotide
taggattttccactact

SEQ ID NO: 1761 - DNA, 17 bp, Artificial Sequence
  Description of Artificial Sequence: Synthetic oligonucleotide
gtaggattttccactac

SEQ ID NO: 1762 - DNA, 17 bp, Artificial Sequence
  Description of Artificial Sequence: Synthetic oligonucleotide
ggtaggattttccacta

SEQ ID NO: 1763 - DNA, 17 bp, Artificial Sequence
  Description of Artificial Sequence: Synthetic oligonucleotide
acttcggtagttttcac

SEQ ID NO: 1764 - DNA, 17 bp, Artificial Sequence
  Description of Artificial Sequence: Synthetic oligonucleotide
aacttcggtagttttca

SEQ ID NO: 1765 - DNA, 17 bp, Artificial Sequence
  Description of Artificial Sequence: Synthetic oligonucleotide
caacttcggtagttttc

SEQ ID NO: 1766 - DNA, 17 bp, Artificial Sequence
  Description of Artificial Sequence: Synthetic oligonucleotide
acaacttcggtagtttt

SEQ ID NO: 1767 - DNA, 17 bp, Artificial Sequence
  Description of Artificial Sequence: Synthetic oligonucleotide
tacaacttcggtagttt

SEQ ID NO: 1768 - DNA, 17 bp, Artificial Sequence
  Description of Artificial Sequence: Synthetic oligonucleotide
ctacaacttcggtagtt

SEQ ID NO: 1769 - DNA, 17 bp, Artificial Sequence
  Description of Artificial Sequence: Synthetic oligonucleotide
cctacaacttcggtagt

SEQ ID NO: 1770 - DNA, 17 bp, Artificial Sequence
  Description of Artificial Sequence: Synthetic oligonucleotide
tcattaggtttcttaat

SEQ ID NO: 1771 - DNA, 17 bp, Artificial Sequence
  Description of Artificial Sequence: Synthetic oligonucleotide
ttaacaatagttgtaca

SEQ ID NO: 1772 - DNA, 17 bp, Artificial Sequence
  Description of Artificial Sequence: Synthetic oligonucleotide
attaacaatagttgtac

SEQ ID NO: 1773 - DNA, 17 bp, Artificial Sequence
  Description of Artificial Sequence: Synthetic oligonucleotide
cattaacaatagttgta

SEQ ID NO: 1774 - DNA, 17 bp, Artificial Sequence
  Description of Artificial Sequence: Synthetic oligonucleotide
ccattaacaatagttgt

SEQ ID NO: 1775 - DNA, 17 bp, Artificial Sequence
  Description of Artificial Sequence: Synthetic oligonucleotide
attggtcttttaaactg

SEQ ID NO: 1776 - DNA, 17 bp, Artificial Sequence
  Description of Artificial Sequence: Synthetic oligonucleotide
ttgtgactttttgctac

SEQ ID NO: 1777 - DNA, 17 bp, Artificial Sequence
  Description of Artificial Sequence: Synthetic oligonucleotide
tgtcacgagtgacacca

SEQ ID NO: 1778 - DNA, 17 bp, Artificial Sequence
  Description of Artificial Sequence: Synthetic oligonucleotide
atgtcacgagtgacacc

SEQ ID NO: 1779 - DNA, 17 bp, Artificial Sequence
  Description of Artificial Sequence: Synthetic oligonucleotide
tgtcaagtacaagtaaa

SEQ ID NO: 1780 - DNA, 17 bp, Artificial Sequence
  Description of Artificial Sequence: Synthetic oligonucleotide
atgtcaagtacaagtaa

SEQ ID NO: 1781 - DNA, 17 bp, Artificial Sequence
  Description of Artificial Sequence: Synthetic oligonucleotide
aatgtcaagtacaagta

SEQ ID NO: 1782 - DNA, 17 bp, Artificial Sequence
  Description of Artificial Sequence: Synthetic oligonucleotide
acatgtcttggacagta

SEQ ID NO: 1783 - DNA, 17 bp, Artificial Sequence
  Description of Artificial Sequence: Synthetic oligonucleotide
gatggtgaaccattgta

SEQ ID NO: 1784 - DNA, 17 bp, Artificial Sequence
  Description of Artificial Sequence: Synthetic oligonucleotide
ccaacactaccacatga

SEQ ID NO: 1785 - DNA, 17 bp, Artificial Sequence
  Description of Artificial Sequence: Synthetic oligonucleotide
accaacactaccacatg

SEQ ID NO: 1786 - DNA, 17 bp, Artificial Sequence
  Description of Artificial Sequence: Synthetic oligonucleotide
aaccaacactaccacat

SEQ ID NO: 1787 - DNA, 17 bp, Artificial Sequence
  Description of Artificial Sequence: Synthetic oligonucleotide
aaaccaacactaccaca

SEQ ID NO: 1788 - DNA, 17 bp, Artificial Sequence
  Description of Artificial Sequence: Synthetic oligonucleotide
aaaaccaacactaccac

SEQ ID NO: 1789 - DNA, 17 bp, Artificial Sequence
  Description of Artificial Sequence: Synthetic oligonucleotide
taaaaccaacactacca

SEQ ID NO: 1790 - DNA, 17 bp, Artificial Sequence
  Description of Artificial Sequence: Synthetic oligonucleotide
ttaaaaccaacactacc

SEQ ID NO: 1791 - DNA, 17 bp, Artificial Sequence
  Description of Artificial Sequence: Synthetic oligonucleotide
gttaaaaccaacactac

SEQ ID NO: 1792 - DNA, 17 bp, Artificial Sequence
  Description of Artificial Sequence: Synthetic oligonucleotide
tgttaaaaccaacacta

SEQ ID NO: 1793 - DNA, 17 bp, Artificial Sequence
  Description of Artificial Sequence: Synthetic oligonucleotide
atgttaaaaccaacact

SEQ ID NO: 1794 - DNA, 17 bp, Artificial Sequence
  Description of Artificial Sequence: Synthetic oligonucleotide
cctaagaaacaataaac

SEQ ID NO: 1795 - DNA, 17 bp, Artificial Sequence
  Description of Artificial Sequence: Synthetic oligonucleotide
gcctaagaaacaataaa

SEQ ID NO: 1796 - DNA, 17 bp, Artificial Sequence
  Description of Artificial Sequence: Synthetic oligonucleotide
agcctaagaaacaataa

SEQ ID NO: 1797 - DNA, 17 bp, Artificial Sequence
  Description of Artificial Sequence: Synthetic oligonucleotide
tagcctaagaaacaata

SEQ ID NO: 1798 - DNA, 17 bp, Artificial Sequence
  Description of Artificial Sequence: Synthetic oligonucleotide
atagcctaagaaacaat

SEQ ID NO: 1799 - DNA, 17 bp, Artificial Sequence
  Description of Artificial Sequence: Synthetic oligonucleotide
aatagcctaagaaacaa

SEQ ID NO: 1800 - DNA, 17 bp, Artificial Sequence
  Description of Artificial Sequence: Synthetic oligonucleotide
tcataaacaccaagagt

SEQ ID NO: 1801 - DNA, 17 bp, Artificial Sequence
  Description of Artificial Sequence: Synthetic oligonucleotide
attttagactgtacagt

SEQ ID NO: 1802 - DNA, 17 bp, Artificial Sequence
  Description of Artificial Sequence: Synthetic oligonucleotide
cattttagactgtacag

SEQ ID NO: 1803 - DNA, 17 bp, Artificial Sequence
  Description of Artificial Sequence: Synthetic oligonucleotide
acattttagactgtaca

SEQ ID NO: 1804 - DNA, 17 bp, Artificial Sequence
  Description of Artificial Sequence: Synthetic oligonucleotide
gacattttagactgtac

SEQ ID NO: 1805 - DNA, 17 bp, Artificial Sequence
  Description of Artificial Sequence: Synthetic oligonucleotide
acagcaccctgcatgga

SEQ ID NO: 1806 - DNA, 17 bp, Artificial Sequence
  Description of Artificial Sequence: Synthetic oligonucleotide
tacagcaccctgcatgg

SEQ ID NO: 1807 - DNA, 17 bp, Artificial Sequence
  Description of Artificial Sequence: Synthetic oligonucleotide
ctacagcaccctgcatg

SEQ ID NO: 1808 - DNA, 17 bp, Artificial Sequence
  Description of Artificial Sequence: Synthetic oligonucleotide
tctacagcaccctgcat

SEQ ID NO: 1809 - DNA, 17 bp, Artificial Sequence
  Description of Artificial Sequence: Synthetic oligonucleotide
gtctacagcaccctgca

SEQ ID NO: 1810 - DNA, 17 bp, Artificial Sequence
  Description of Artificial Sequence: Synthetic oligonucleotide
tgtctacagcaccctgc

SEQ ID NO: 1811 - DNA, 17 bp, Artificial Sequence
  Description of Artificial Sequence: Synthetic oligonucleotide
atgtctacagcaccctg

SEQ ID NO: 1812 - DNA, 17 bp, Artificial Sequence
  Description of Artificial Sequence: Synthetic oligonucleotide
acttcagaatcaccatt

SEQ ID NO: 1813 - DNA, 17 bp, Artificial Sequence
  Description of Artificial Sequence: Synthetic oligonucleotide
ttagccacattcaaaga

SEQ ID NO: 1814 - DNA, 17 bp, Artificial Sequence
  Description of Artificial Sequence: Synthetic oligonucleotide
tttagccacattcaaag

SEQ ID NO: 1815 - DNA, 17 bp, Artificial Sequence
  Description of Artificial Sequence: Synthetic oligonucleotide
atttagccacattcaaa

SEQ ID NO: 1816 - DNA, 17 bp, Artificial Sequence
  Description of Artificial Sequence: Synthetic oligonucleotide
gatttagccacattcaa

SEQ ID NO: 1817 - DNA, 17 bp, Artificial Sequence
  Description of Artificial Sequence: Synthetic oligonucleotide
agatttagccacattca

SEQ ID NO: 1818 - DNA, 17 bp, Artificial Sequence
  Description of Artificial Sequence: Synthetic oligonucleotide
cagatttagccacattc

SEQ ID NO: 1819 - DNA, 17 bp, Artificial Sequence
  Description of Artificial Sequence: Synthetic oligonucleotide
tcagatttagccacatt

SEQ ID NO: 1820 - DNA, 17 bp, Artificial Sequence
  Description of Artificial Sequence: Synthetic oligonucleotide
gccatcttttccaactt

SEQ ID NO: 1821 - DNA, 17 bp, Artificial Sequence
  Description of Artificial Sequence: Synthetic oligonucleotide
tacatttgggtcatagc

SEQ ID NO: 1822 - DNA, 17 bp, Artificial Sequence
  Description of Artificial Sequence: Synthetic oligonucleotide
acttttgccctcttgtc

SEQ ID NO: 1823 - DNA, 17 bp, Artificial Sequence
  Description of Artificial Sequence: Synthetic oligonucleotide
ttgttgataatgttgtt

SEQ ID NO: 1824 - DNA, 17 bp, Artificial Sequence
  Description of Artificial Sequence: Synthetic oligonucleotide
attgttgataatgttgt

SEQ ID NO: 1825 - DNA, 17 bp, Artificial Sequence
  Description of Artificial Sequence: Synthetic oligonucleotide
cattgttgataatgttg

SEQ ID NO: 1826 - DNA, 17 bp, Artificial Sequence
  Description of Artificial Sequence: Synthetic oligonucleotide
gcattgttgataatgtt

SEQ ID NO: 1827 - DNA, 17 bp, Artificial Sequence
  Description of Artificial Sequence: Synthetic oligonucleotide
gacatctgtcgtagtgc

SEQ ID NO: 1828 - DNA, 17 bp, Artificial Sequence
  Description of Artificial Sequence: Synthetic oligonucleotide
acaaacctacctccctt

SEQ ID NO: 1829 - DNA, 17 bp, Artificial Sequence
  Description of Artificial Sequence: Synthetic oligonucleotide
gggaatctagcccattt

SEQ ID NO: 1830 - DNA, 17 bp, Artificial Sequence
  Description of Artificial Sequence: Synthetic oligonucleotide
agggaatctagcccatt

SEQ ID NO: 1831 - DNA, 17 bp, Artificial Sequence
  Description of Artificial Sequence: Synthetic oligonucleotide
tagggaatctagcccat

SEQ ID NO: 1832 - DNA, 17 bp, Artificial Sequence
  Description of Artificial Sequence: Synthetic oligonucleotide
ttagggaatctagccca

SEQ ID NO: 1833 - DNA, 17 bp, Artificial Sequence
  Description of Artificial Sequence: Synthetic oligonucleotide
cttagggaatctagccc

SEQ ID NO: 1834 - DNA, 17 bp, Artificial Sequence
  Description of Artificial Sequence: Synthetic oligonucleotide
tcttagggaatctagcc

SEQ ID NO: 1835 - DNA, 17 bp, Artificial Sequence
  Description of Artificial Sequence: Synthetic oligonucleotide
ctcttagggaatctagc

SEQ ID NO: 1836 - DNA, 17 bp, Artificial Sequence
  Description of Artificial Sequence: Synthetic oligonucleotide
actcttagggaatctag

SEQ ID NO: 1837 - DNA, 17 bp, Artificial Sequence
  Description of Artificial Sequence: Synthetic oligonucleotide
cactcttagggaatcta

SEQ ID NO: 1838 - DNA, 17 bp, Artificial Sequence
  Description of Artificial Sequence: Synthetic oligonucleotide
tcactcttagggaatct

SEQ ID NO: 1839 - DNA, 17 bp, Artificial Sequence
  Description of Artificial Sequence: Synthetic oligonucleotide
atcactcttagggaatc

SEQ ID NO: 1840 - DNA, 17 bp, Artificial Sequence
  Description of Artificial Sequence: Synthetic oligonucleotide
catcactcttagggaat

SEQ ID NO: 1841 - DNA, 17 bp, Artificial Sequence
  Description of Artificial Sequence: Synthetic oligonucleotide
ccatcactcttagggaa

SEQ ID NO: 1842 - DNA, 17 bp, Artificial Sequence
  Description of Artificial Sequence: Synthetic oligonucleotide
aggtggttccagttctg

SEQ ID NO: 1843 - DNA, 17 bp, Artificial Sequence
  Description of Artificial Sequence: Synthetic oligonucleotide
aaggtggttccagttct

SEQ ID NO: 1844 - DNA, 17 bp, Artificial Sequence
  Description of Artificial Sequence: Synthetic oligonucleotide
caaggtggttccagttc

SEQ ID NO: 1845 - DNA, 17 bp, Artificial Sequence
  Description of Artificial Sequence: Synthetic oligonucleotide
acaaggtggttccagtt

SEQ ID NO: 1846 - DNA, 17 bp, Artificial Sequence
  Description of Artificial Sequence: Synthetic oligonucleotide
tacaaggtggttccagt

SEQ ID NO: 1847 - DNA, 17 bp, Artificial Sequence
  Description of Artificial Sequence: Synthetic oligonucleotide
ctacaaggtggttccag

SEQ ID NO: 1848 - DNA, 17 bp, Artificial Sequence
  Description of Artificial Sequence: Synthetic oligonucleotide
cctacaaggtggttcca

SEQ ID NO: 1849 - DNA, 17 bp, Artificial Sequence
  Description of Artificial Sequence: Synthetic oligonucleotide
acctacaaggtggttcc

SEQ ID NO: 1850 - DNA, 17 bp, Artificial Sequence
  Description of Artificial Sequence: Synthetic oligonucleotide
aacctacaaggtggttc

SEQ ID NO: 1851 - DNA, 17 bp, Artificial Sequence
  Description of Artificial Sequence: Synthetic oligonucleotide
aaacctacaaggtggtt

SEQ ID NO: 1852 - DNA, 17 bp, Artificial Sequence
  Description of Artificial Sequence: Synthetic oligonucleotide
caaacctacaaggtggt

SEQ ID NO: 1853 - DNA, 17 bp, Artificial Sequence
  Description of Artificial Sequence: Synthetic oligonucleotide
acaaacctacaaggtgg

SEQ ID NO: 1854 - DNA, 17 bp, Artificial Sequence
  Description of Artificial Sequence: Synthetic oligonucleotide
aacaaacctacaaggtg

SEQ ID NO: 1855 - DNA, 17 bp, Artificial Sequence
  Description of Artificial Sequence: Synthetic oligonucleotide
taacaaacctacaaggt

SEQ ID NO: 1856 - DNA, 17 bp, Artificial Sequence
  Description of Artificial Sequence: Synthetic oligonucleotide
gtaacaaacctacaagg

SEQ ID NO: 1857 - DNA, 17 bp, Artificial Sequence
  Description of Artificial Sequence: Synthetic oligonucleotide
tgtaacaaacctacaag

SEQ ID NO: 1858 - DNA, 17 bp, Artificial Sequence
  Description of Artificial Sequence: Synthetic oligonucleotide
ctgtaacaaacctacaa

SEQ ID NO: 1859 - DNA, 17 bp, Artificial Sequence
  Description of Artificial Sequence: Synthetic oligonucleotide
tctgtaacaaacctaca

SEQ ID NO: 1860 - DNA, 17 bp, Artificial Sequence
  Description of Artificial Sequence: Synthetic oligonucleotide
gtctgtaacaaacctac

SEQ ID NO: 1861 - DNA, 17 bp, Artificial Sequence
  Description of Artificial Sequence: Synthetic oligonucleotide
tgtctgtaacaaaccta

SEQ ID NO: 1862 - DNA, 17 bp, Artificial Sequence
  Description of Artificial Sequence: Synthetic oligonucleotide
gtgtctgtaacaaacct

SEQ ID NO: 1863 - DNA, 17 bp, Artificial Sequence
  Description of Artificial Sequence: Synthetic oligonucleotide
tgtgtctgtaacaaacc

SEQ ID NO: 1864 - DNA, 17 bp, Artificial Sequence
  Description of Artificial Sequence: Synthetic oligonucleotide
gtgtgtctgtaacaaac

SEQ ID NO: 1865 - DNA, 17 bp, Artificial Sequence
  Description of Artificial Sequence: Synthetic oligonucleotide
ggtgtgtctgtaacaaa

SEQ ID NO: 1866 - DNA, 17 bp, Artificial Sequence
  Description of Artificial Sequence: Synthetic oligonucleotide
tctatttaggttgttta

SEQ ID NO: 1867 - DNA, 17 bp, Artificial Sequence
  Description of Artificial Sequence: Synthetic oligonucleotide
ctctatttaggttgttt

SEQ ID NO: 1868 - DNA, 17 bp, Artificial Sequence
  Description of Artificial Sequence: Synthetic oligonucleotide
cctctatttaggttgtt

SEQ ID NO: 1869 - DNA, 17 bp, Artificial Sequence
  Description of Artificial Sequence: Synthetic oligonucleotide
acctctatttaggttgt

SEQ ID NO: 1870 - DNA, 17 bp, Artificial Sequence
  Description of Artificial Sequence: Synthetic oligonucleotide
tacctctatttaggttg

SEQ ID NO: 1871 - DNA, 17 bp, Artificial Sequence
  Description of Artificial Sequence: Synthetic oligonucleotide
atacctctatttaggtt

SEQ ID NO: 1872 - DNA, 17 bp, Artificial Sequence
  Description of Artificial Sequence: Synthetic oligonucleotide
catacctctatttaggt

SEQ ID NO: 1873 - DNA, 17 bp, Artificial Sequence
  Description of Artificial Sequence: Synthetic oligonucleotide
ccatacctctatttagg

SEQ ID NO: 1874 - DNA, 17 bp, Artificial Sequence
  Description of Artificial Sequence: Synthetic oligonucleotide
accatacctctatttag

SEQ ID NO: 1875 - DNA, 17 bp, Artificial Sequence
  Description of Artificial Sequence: Synthetic oligonucleotide
acagttgaattggcagg

SEQ ID NO: 1876 - DNA, 17 bp, Artificial Sequence
  Description of Artificial Sequence: Synthetic oligonucleotide
tgtgtacacaacatctt

SEQ ID NO: 1877 - DNA, 17 bp, Artificial Sequence
  Description of Artificial Sequence: Synthetic oligonucleotide
gtgtgtacacaacatct

SEQ ID NO: 1878 - DNA, 17 bp, Artificial Sequence
  Description of Artificial Sequence: Synthetic oligonucleotide
tgtgtgtacacaacatc

SEQ ID NO: 1879 - DNA, 17 bp, Artificial Sequence
  Description of Artificial Sequence: Synthetic oligonucleotide
gtgtgtgtacacaacat

SEQ ID NO: 1880 - DNA, 17 bp, Artificial Sequence
  Description of Artificial Sequence: Synthetic oligonucleotide
agtgtgtgtacacaaca

SEQ ID NO: 1881 - DNA, 17 bp, Artificial Sequence
  Description of Artificial Sequence: Synthetic oligonucleotide
cagtgtgtgtacacaac

SEQ ID NO: 1882 - DNA, 17 bp, Artificial Sequence
  Description of Artificial Sequence: Synthetic oligonucleotide
ccagtgtgtgtacacaa

SEQ ID NO: 1883 - DNA, 17 bp, Artificial Sequence
  Description of Artificial Sequence: Synthetic oligonucleotide
accagtgtgtgtacaca

SEQ ID NO: 1884 - DNA, 17 bp, Artificial Sequence
  Description of Artificial Sequence: Synthetic oligonucleotide
taccagtgtgtgtacac

SEQ ID NO: 1885 - DNA, 17 bp, Artificial Sequence
  Description of Artificial Sequence: Synthetic oligonucleotide
gtaccagtgtgtgtaca

SEQ ID NO: 1886 - DNA, 17 bp, Artificial Sequence
  Description of Artificial Sequence: Synthetic oligonucleotide
gggtcattagcacaagt

SEQ ID NO: 1887 - DNA, 17 bp, Artificial Sequence
  Description of Artificial Sequence: Synthetic oligonucleotide
cggtacagactgtgttt

SEQ ID NO: 1888 - DNA, 17 bp, Artificial Sequence
  Description of Artificial Sequence: Synthetic oligonucleotide
acggtacagactgtgtt

SEQ ID NO: 1889 - DNA, 17 bp, Artificial Sequence
  Description of Artificial Sequence: Synthetic oligonucleotide
gacggtacagactgtgt

SEQ ID NO: 1890 - DNA, 17 bp, Artificial Sequence
  Description of Artificial Sequence: Synthetic oligonucleotide
agacggtacagactgtg

SEQ ID NO: 1891 - DNA, 17 bp, Artificial Sequence
  Description of Artificial Sequence: Synthetic oligonucleotide
cagacggtacagactgt

SEQ ID NO: 1892 - DNA, 17 bp, Artificial Sequence
  Description of Artificial Sequence: Synthetic oligonucleotide
gcagacggtacagactg

SEQ ID NO: 1893 - DNA, 17 bp, Artificial Sequence
  Description of Artificial Sequence: Synthetic oligonucleotide
cgcagacggtacagact

SEQ ID NO: 1894 - DNA, 17 bp, Artificial Sequence
  Description of Artificial Sequence: Synthetic oligonucleotide
ccgcagacggtacagac

SEQ ID NO: 1895 - DNA, 17 bp, Artificial Sequence
  Description of Artificial Sequence: Synthetic oligonucleotide
ccataacctttccacat

SEQ ID NO: 1896 - DNA, 17 bp, Artificial Sequence
  Description of Artificial Sequence: Synthetic oligonucleotide
gccataacctttccaca

SEQ ID NO: 1897 - DNA, 17 bp, Artificial Sequence
  Description of Artificial Sequence: Synthetic oligonucleotide
agccataacctttccac

SEQ ID NO: 1898 - DNA, 17 bp, Artificial Sequence
  Description of Artificial Sequence: Synthetic oligonucleotide
cagccataacctttcca

SEQ ID NO: 1899 - DNA, 17 bp, Artificial Sequence
  Description of Artificial Sequence: Synthetic oligonucleotide
acagccataacctttcc

SEQ ID NO: 1900 - DNA, 17 bp, Artificial Sequence
  Description of Artificial Sequence: Synthetic oligonucleotide
tacagccataacctttc

SEQ ID NO: 1901 - DNA, 17 bp, Artificial Sequence
  Description of Artificial Sequence: Synthetic oligonucleotide
ctacagccataaccttt

SEQ ID NO: 1902 - DNA, 17 bp, Artificial Sequence
  Description of Artificial Sequence: Synthetic oligonucleotide
actacagccataacctt

SEQ ID NO: 1903 - DNA, 17 bp, Artificial Sequence
  Description of Artificial Sequence: Synthetic oligonucleotide
aactacagccataacct

SEQ ID NO: 1904 - DNA, 17 bp, Artificial Sequence
  Description of Artificial Sequence: Synthetic oligonucleotide
caactacagccataacc

SEQ ID NO: 1905 - DNA, 17 bp, Artificial Sequence
  Description of Artificial Sequence: Synthetic oligonucleotide
acaactacagccataac

SEQ ID NO: 1906 - DNA, 17 bp, Artificial Sequence
  Description of Artificial Sequence: Synthetic oligonucleotide
cacaactacagccataa

SEQ ID NO: 1907 - DNA, 17 bp, Artificial Sequence
  Description of Artificial Sequence: Synthetic oligonucleotide
tcacaactacagccata

SEQ ID NO: 1908 - DNA, 17 bp, Artificial Sequence
  Description of Artificial Sequence: Synthetic oligonucleotide
aaacccgtttaaaaacg

SEQ ID NO: 1909 - DNA, 17 bp, Artificial Sequence
  Description of Artificial Sequence: Synthetic oligonucleotide
caaacccgtttaaaaac

SEQ ID NO: 1910 - DNA, 17 bp, Artificial Sequence
  Description of Artificial Sequence: Synthetic oligonucleotide
gcaaacccgtttaaaaa

SEQ ID NO: 1911 - DNA, 17 bp, Artificial Sequence
  Description of Artificial Sequence: Synthetic oligonucleotide
cgcaaacccgtttaaaa

SEQ ID NO: 1912 - DNA, 17 bp, Artificial Sequence
  Description of Artificial Sequence: Synthetic oligonucleotide
ccgcaaacccgtttaaa

SEQ ID NO: 1913 - DNA, 17 bp, Artificial Sequence
  Description of Artificial Sequence: Synthetic oligonucleotide
accgcaaacccgtttaa

SEQ ID NO: 1914 - DNA, 17 bp, Artificial Sequence
  Description of Artificial Sequence: Synthetic oligonucleotide
caccgcaaacccgttta

SEQ ID NO: 1915 - DNA, 17 bp, Artificial Sequence
  Description of Artificial Sequence: Synthetic oligonucleotide
acaccgcaaacccgttt

SEQ ID NO: 1916 - DNA, 17 bp, Artificial Sequence
  Description of Artificial Sequence: Synthetic oligonucleotide
tacaccgcaaacccgtt

SEQ ID NO: 1917 - DNA, 17 bp, Artificial Sequence
  Description of Artificial Sequence: Synthetic oligonucleotide
ttacaccgcaaacccgt

SEQ ID NO: 1918 - DNA, 17 bp, Artificial Sequence
  Description of Artificial Sequence: Synthetic oligonucleotide
cttacaccgcaaacccg

SEQ ID NO: 1919 - DNA, 17 bp, Artificial Sequence
  Description of Artificial Sequence: Synthetic oligonucleotide
acttacaccgcaaaccc

SEQ ID NO: 1920 - DNA, 17 bp, Artificial Sequence
  Description of Artificial Sequence: Synthetic oligonucleotide
cacttacaccgcaaacc

SEQ ID NO: 1921 - DNA, 17 bp, Artificial Sequence
  Description of Artificial Sequence: Synthetic oligonucleotide
gcacttacaccgcaaac

SEQ ID NO: 1922 - DNA, 17 bp, Artificial Sequence
  Description of Artificial Sequence: Synthetic oligonucleotide
tgcacttacaccgcaaa

SEQ ID NO: 1923 - DNA, 17 bp, Artificial Sequence
  Description of Artificial Sequence: Synthetic oligonucleotide
ctgcacttacaccgcaa

SEQ ID NO: 1924 - DNA, 17 bp, Artificial Sequence
  Description of Artificial Sequence: Synthetic oligonucleotide
gctgcacttacaccgca

SEQ ID NO: 1925 - DNA, 17 bp, Artificial Sequence
  Description of Artificial Sequence: Synthetic oligonucleotide
ggctgcacttacaccgc

SEQ ID NO: 1926 - DNA, 17 bp, Artificial Sequence
  Description of Artificial Sequence: Synthetic oligonucleotide
gggctgcacttacaccg

SEQ ID NO: 1927 - DNA, 17 bp, Artificial Sequence
  Description of Artificial Sequence: Synthetic oligonucleotide
cgggctgcacttacacc

SEQ ID NO: 1928 - DNA, 17 bp, Artificial Sequence
  Description of Artificial Sequence: Synthetic oligonucleotide
acgggctgcacttacac

SEQ ID NO: 1929 - DNA, 17 bp, Artificial Sequence
  Description of Artificial Sequence: Synthetic oligonucleotide
gacgggctgcacttaca

SEQ ID NO: 1930 - DNA, 17 bp, Artificial Sequence
  Description of Artificial Sequence: Synthetic oligonucleotide
agacgggctgcacttac

SEQ ID NO: 1931 - DNA, 17 bp, Artificial Sequence
  Description of Artificial Sequence: Synthetic oligonucleotide
aagacgggctgcactta

SEQ ID NO: 1932 - DNA, 17 bp, Artificial Sequence
  Description of Artificial Sequence: Synthetic oligonucleotide
taagacgggctgcactt

SEQ ID NO: 1933 - DNA, 17 bp, Artificial Sequence
  Description of Artificial Sequence: Synthetic oligonucleotide
gtaagacgggctgcact

SEQ ID NO: 1934 - DNA, 17 bp, Artificial Sequence
  Description of Artificial Sequence: Synthetic oligonucleotide
tgtaagacgggctgcac

SEQ ID NO: 1935 - DNA, 17 bp, Artificial Sequence
  Description of Artificial Sequence: Synthetic oligonucleotide
gtgtaagacgggctgca

SEQ ID NO: 1936 - DNA, 17 bp, Artificial Sequence
  Description of Artificial Sequence: Synthetic oligonucleotide
ggtgtaagacgggctgc

SEQ ID NO: 1937 - DNA, 17 bp, Artificial Sequence
  Description of Artificial Sequence: Synthetic oligonucleotide
cggtgtaagacgggctg

SEQ ID NO: 1938 - DNA, 17 bp, Artificial Sequence
  Description of Artificial Sequence: Synthetic oligonucleotide
acggtgtaagacgggct

SEQ ID NO: 1939 - DNA, 17 bp, Artificial Sequence
  Description of Artificial Sequence: Synthetic oligonucleotide
cacggtgtaagacgggc

SEQ ID NO: 1940 - DNA, 17 bp, Artificial Sequence
  Description of Artificial Sequence: Synthetic oligonucleotide
gcacggtgtaagacggg

SEQ ID NO: 1941 - DNA, 17 bp, Artificial Sequence
  Description of Artificial Sequence: Synthetic oligonucleotide
cgcacggtgtaagacgg

SEQ ID NO: 1942 - DNA, 17 bp, Artificial Sequence
  Description of Artificial Sequence: Synthetic oligonucleotide
ccgcacggtgtaagacg

SEQ ID NO: 1943 - DNA, 17 bp, Artificial Sequence
  Description of Artificial Sequence: Synthetic oligonucleotide
gccgcacggtgtaagac

SEQ ID NO: 1944 - DNA, 17 bp, Artificial Sequence
  Description of Artificial Sequence: Synthetic oligonucleotide
tgccgcacggtgtaaga

SEQ ID NO: 1945 - DNA, 17 bp, Artificial Sequence
  Description of Artificial Sequence: Synthetic oligonucleotide
gtgccgcacggtgtaag

SEQ ID NO: 1946 - DNA, 17 bp, Artificial Sequence
  Description of Artificial Sequence: Synthetic oligonucleotide
tgtgccgcacggtgtaa

SEQ ID NO: 1947 - DNA, 17 bp, Artificial Sequence
  Description of Artificial Sequence: Synthetic oligonucleotide
ctgtgccgcacggtgta

SEQ ID NO: 1948 - DNA, 17 bp, Artificial Sequence
  Description of Artificial Sequence: Synthetic oligonucleotide
cctgtgccgcacggtgt

SEQ ID NO: 1949 - DNA, 17 bp, Artificial Sequence
  Description of Artificial Sequence: Synthetic oligonucleotide
gcctgtgccgcacggtg

SEQ ID NO: 1950 - DNA, 17 bp, Artificial Sequence
  Description of Artificial Sequence: Synthetic oligonucleotide
tgcctgtgccgcacggt

SEQ ID NO: 1951 - DNA, 17 bp, Artificial Sequence
  Description of Artificial Sequence: Synthetic oligonucleotide
gtgcctgtgccgcacgg

SEQ ID NO: 1952 - DNA, 17 bp, Artificial Sequence
  Description of Artificial Sequence: Synthetic oligonucleotide
agtgcctgtgccgcacg

SEQ ID NO: 1953 - DNA, 17 bp, Artificial Sequence
  Description of Artificial Sequence: Synthetic oligonucleotide
tagtgcctgtgccgcac

SEQ ID NO: 1954 - DNA, 17 bp, Artificial Sequence
  Description of Artificial Sequence: Synthetic oligonucleotide
ctagtgcctgtgccgca

SEQ ID NO: 1955 - DNA, 17 bp, Artificial Sequence
  Description of Artificial Sequence: Synthetic oligonucleotide
caattagtttttaggaa

SEQ ID NO: 1956 - DNA, 17 bp, Artificial Sequence
  Description of Artificial Sequence: Synthetic oligonucleotide
tcttcatgttggtagtt

SEQ ID NO: 1957 - DNA, 17 bp, Artificial Sequence
  Description of Artificial Sequence: Synthetic oligonucleotide
tgtggtaccatgtcacc

SEQ ID NO: 1958 - DNA, 17 bp, Artificial Sequence
  Description of Artificial Sequence: Synthetic oligonucleotide
atgtggtaccatgtcac

SEQ ID NO: 1959 - DNA, 17 bp, Artificial Sequence
  Description of Artificial Sequence: Synthetic oligonucleotide
tatgtggtaccatgtca

SEQ ID NO: 1960 - DNA, 17 bp, Artificial Sequence
  Description of Artificial Sequence: Synthetic oligonucleotide
atatgtggtaccatgtc

SEQ ID NO: 1961 - DNA, 17 bp, Artificial Sequence
  Description of Artificial Sequence: Synthetic oligonucleotide
tatatgtggtaccatgt

SEQ ID NO: 1962 - DNA, 17 bp, Artificial Sequence
  Description of Artificial Sequence: Synthetic oligonucleotide
atatatgtggtaccatg

SEQ ID NO: 1963 - DNA, 17 bp, Artificial Sequence
  Description of Artificial Sequence: Synthetic oligonucleotide
gatatatgtggtaccat

SEQ ID NO: 1964 - DNA, 17 bp, Artificial Sequence
  Description of Artificial Sequence: Synthetic oligonucleotide
tgatatatgtggtacca

SEQ ID NO: 1965 - DNA, 17 bp, Artificial Sequence
  Description of Artificial Sequence: Synthetic oligonucleotide
gtgatatatgtggtacc

SEQ ID NO: 1966 - DNA, 17 bp, Artificial Sequence
  Description of Artificial Sequence: Synthetic oligonucleotide
cgtgatatatgtggtac

SEQ ID NO: 1967 - DNA, 17 bp, Artificial Sequence
  Description of Artificial Sequence: Synthetic oligonucleotide
acgtgatatatgtggta

SEQ ID NO: 1968 - DNA, 17 bp, Artificial Sequence
  Description of Artificial Sequence: Synthetic oligonucleotide
gacgtgatatatgtggt

SEQ ID NO: 1969 - DNA, 17 bp, Artificial Sequence
  Description of Artificial Sequence: Synthetic oligonucleotide
tgacgtgatatatgtgg

SEQ ID NO: 1970 - DNA, 17 bp, Artificial Sequence
  Description of Artificial Sequence: Synthetic oligonucleotide
gccattgtgtatttagt

SEQ ID NO: 1971 - DNA, 17 bp, Artificial Sequence
  Description of Artificial Sequence: Synthetic oligonucleotide
tatttaaaataacggtc

SEQ ID NO: 1972 - DNA, 17 bp, Artificial Sequence
  Description of Artificial Sequence: Synthetic oligonucleotide
atatttaaaataacggt

SEQ ID NO: 1973 - DNA, 17 bp, Artificial Sequence
  Description of Artificial Sequence: Synthetic oligonucleotide
aatatttaaaataacgg

SEQ ID NO: 1974 - DNA, 17 bp, Artificial Sequence
  Description of Artificial Sequence: Synthetic oligonucleotide
caatatttaaaataacg

SEQ ID NO: 1975 - DNA, 17 bp, Artificial Sequence
  Description of Artificial Sequence: Synthetic oligonucleotide
ccaatatttaaaataac

SEQ ID NO: 1976 - DNA, 17 bp, Artificial Sequence
  Description of Artificial Sequence: Synthetic oligonucleotide
cccaatatttaaaataa

SEQ ID NO: 1977 - DNA, 17 bp, Artificial Sequence
  Description of Artificial Sequence: Synthetic oligonucleotide
tcccaatatttaaaata

SEQ ID NO: 1978 - DNA, 17 bp, Artificial Sequence
  Description of Artificial Sequence: Synthetic oligonucleotide
ccaaaacttgtaggtgg

SEQ ID NO: 1979 - DNA, 17 bp, Artificial Sequence
  Description of Artificial Sequence: Synthetic oligonucleotide
tccaaaacttgtaggtg

SEQ ID NO: 1980 - DNA, 17 bp, Artificial Sequence
  Description of Artificial Sequence: Synthetic oligonucleotide
gtccaaaacttgtaggt

SEQ ID NO: 1981 - DNA, 17 bp, Artificial Sequence
  Description of Artificial Sequence: Synthetic oligonucleotide
ggtccaaaacttgtagg

SEQ ID NO: 1982 - DNA, 17 bp, Artificial Sequence
  Description of Artificial Sequence: Synthetic oligonucleotide
tggtccaaaacttgtag

SEQ ID NO: 1983 - DNA, 17 bp, Artificial Sequence
  Description of Artificial Sequence: Synthetic oligonucleotide
gtggtccaaaacttgta

SEQ ID NO: 1984 - DNA, 17 bp, Artificial Sequence
  Description of Artificial Sequence: Synthetic oligonucleotide
agtggtccaaaacttgt

SEQ ID NO: 1985 - DNA, 17 bp, Artificial Sequence
  Description of Artificial Sequence: Synthetic oligonucleotide
tagtggtccaaaacttg

SEQ ID NO: 1986 - DNA, 17 bp, Artificial Sequence
  Description of Artificial Sequence: Synthetic oligonucleotide
ctagtggtccaaaactt

SEQ ID NO: 1987 - DNA, 17 bp, Artificial Sequence
  Description of Artificial Sequence: Synthetic oligonucleotide
actagtggtccaaaact

SEQ ID NO: 1988 - DNA, 17 bp, Artificial Sequence
  Description of Artificial Sequence: Synthetic oligonucleotide
acatcctgattatgtac

SEQ ID NO: 1989 - DNA, 17 bp, Artificial Sequence
  Description of Artificial Sequence: Synthetic oligonucleotide
tacatcctgattatgta

SEQ ID NO: 1990 - DNA, 17 bp, Artificial Sequence
  Description of Artificial Sequence: Synthetic oligonucleotide
ttacatcctgattatgt

SEQ ID NO: 1991 - DNA, 17 bp, Artificial Sequence
  Description of Artificial Sequence: Synthetic oligonucleotide
tttacatcctgattatg

SEQ ID NO: 1992 - DNA, 17 bp, Artificial Sequence
  Description of Artificial Sequence: Synthetic oligonucleotide
gtttacatcctgattat

SEQ ID NO: 1993 - DNA, 17 bp, Artificial Sequence
  Description of Artificial Sequence: Synthetic oligonucleotide
agtttacatcctgatta

SEQ ID NO: 1994 - DNA, 17 bp, Artificial Sequence
  Description of Artificial Sequence: Synthetic oligonucleotide
aagtttacatcctgatt

SEQ ID NO: 1995 - DNA, 17 bp, Artificial Sequence
  Description of Artificial Sequence: Synthetic oligonucleotide
taagtttacatcctgat

SEQ ID NO: 1996 - DNA, 17 bp, Artificial Sequence
  Description of Artificial Sequence: Synthetic oligonucleotide
gtaagtttacatcctga

SEQ ID NO: 1997 - DNA, 17 bp, Artificial Sequence
  Description of Artificial Sequence: Synthetic oligonucleotide
tgtaagtttacatcctg

SEQ ID NO: 1998 - DNA, 17 bp, Artificial Sequence
  Description of Artificial Sequence: Synthetic oligonucleotide
atgtaagtttacatcct

SEQ ID NO: 1999 - DNA, 17 bp, Artificial Sequence
  Description of Artificial Sequence: Synthetic oligonucleotide
tatgtaagtttacatcc

SEQ ID NO: 2000 - DNA, 17 bp, Artificial Sequence
  Description of Artificial Sequence: Synthetic oligonucleotide
ctatgtaagtttacatc

SEQ ID NO: 2001 - DNA, 17 bp, Artificial Sequence
  Description of Artificial Sequence: Synthetic oligonucleotide
gctatgtaagtttacat

SEQ ID NO: 2002 - DNA, 17 bp, Artificial Sequence
  Description of Artificial Sequence: Synthetic oligonucleotide
agctatgtaagtttaca

SEQ ID NO: 2003 - DNA, 17 bp, Artificial Sequence
  Description of Artificial Sequence: Synthetic oligonucleotide
gagctatgtaagtttac

SEQ ID NO: 2004 - DNA, 17 bp, Artificial Sequence
  Description of Artificial Sequence: Synthetic oligonucleotide
gtagtgcgtttatctag

SEQ ID NO: 2005 - DNA, 17 bp, Artificial Sequence
  Description of Artificial Sequence: Synthetic oligonucleotide
gcagctactgaaaagca

SEQ ID NO: 2006 - DNA, 17 bp, Artificial Sequence
  Description of Artificial Sequence: Synthetic oligonucleotide
tgcagctactgaaaagc

SEQ ID NO: 2007 - DNA, 17 bp, Artificial Sequence
  Description of Artificial Sequence: Synthetic oligonucleotide
gtgcagctactgaaaag

SEQ ID NO: 2008 - DNA, 17 bp, Artificial Sequence
  Description of Artificial Sequence: Synthetic oligonucleotide
agtgcagctactgaaaa

SEQ ID NO: 2009 - DNA, 17 bp, Artificial Sequence
  Description of Artificial Sequence: Synthetic oligonucleotide
gtttgaaaagcaacatt

SEQ ID NO: 2010 - DNA, 17 bp, Artificial Sequence
  Description of Artificial Sequence: Synthetic oligonucleotide
agtttgaaaagcaacat

SEQ ID NO: 2011 - DNA, 17 bp, Artificial Sequence
  Description of Artificial Sequence: Synthetic oligonucleotide
cagtttgaaaagcaaca

SEQ ID NO: 2012 - DNA, 17 bp, Artificial Sequence
  Description of Artificial Sequence: Synthetic oligonucleotide
acagtttgaaaagcaac

SEQ ID NO: 2013 - DNA, 17 bp, Artificial Sequence
  Description of Artificial Sequence: Synthetic oligonucleotide
gacagtttgaaaagcaa

SEQ ID NO: 2014 - DNA, 17 bp, Artificial Sequence
  Description of Artificial Sequence: Synthetic oligonucleotide
tgacagtttgaaaagca

SEQ ID NO: 2015 - DNA, 17 bp, Artificial Sequence
  Description of Artificial Sequence: Synthetic oligonucleotide
ttgacagtttgaaaagc

SEQ ID NO: 2016 - DNA, 17 bp, Artificial Sequence
  Description of Artificial Sequence: Synthetic oligonucleotide
tttgacagtttgaaaag

SEQ ID NO: 2017 - DNA, 17 bp, Artificial Sequence
  Description of Artificial Sequence: Synthetic oligonucleotide
gtttgacagtttgaaaa

SEQ ID NO: 2018 - DNA, 17 bp, Artificial Sequence
  Description of Artificial Sequence: Synthetic oligonucleotide
ggtttgacagtttgaaa

SEQ ID NO: 2019 - DNA, 17 bp, Artificial Sequence
  Description of Artificial Sequence: Synthetic oligonucleotide
gggtttgacagtttgaa

SEQ ID NO: 2020 - DNA, 17 bp, Artificial Sequence
  Description of Artificial Sequence: Synthetic oligonucleotide
cgggtttgacagtttga

SEQ ID NO: 2021 - DNA, 17 bp, Artificial Sequence
  Description of Artificial Sequence: Synthetic oligonucleotide
ccgggtttgacagtttg

SEQ ID NO: 2022 - DNA, 17 bp, Artificial Sequence
  Description of Artificial Sequence: Synthetic oligonucleotide
accgggtttgacagttt

SEQ ID NO: 2023 - DNA, 17 bp, Artificial Sequence
  Description of Artificial Sequence: Synthetic oligonucleotide
taccgggtttgacagtt

SEQ ID NO: 2024 - DNA, 17 bp, Artificial Sequence
  Description of Artificial Sequence: Synthetic oligonucleotide
ttaccgggtttgacagt

SEQ ID NO: 2025 - DNA, 17 bp, Artificial Sequence
  Description of Artificial Sequence: Synthetic oligonucleotide
attaccgggtttgacag

SEQ ID NO: 2026 - DNA, 17 bp, Artificial Sequence
  Description of Artificial Sequence: Synthetic oligonucleotide
aattaccgggtttgaca

SEQ ID NO: 2027 - DNA, 17 bp, Artificial Sequence
  Description of Artificial Sequence: Synthetic oligonucleotide
aaattaccgggtttgac

SEQ ID NO: 2028 - DNA, 17 bp, Artificial Sequence
  Description of Artificial Sequence: Synthetic oligonucleotide
aaaattaccgggtttga

SEQ ID NO: 2029 - DNA, 17 bp, Artificial Sequence
  Description of Artificial Sequence: Synthetic oligonucleotide
taaaattaccgggtttg

SEQ ID NO: 2030 - DNA, 17 bp, Artificial Sequence
  Description of Artificial Sequence: Synthetic oligonucleotide
ttaaaattaccgggttt

SEQ ID NO: 2031 - DNA, 17 bp, Artificial Sequence
  Description of Artificial Sequence: Synthetic oligonucleotide
gacacagcaaagtcata

SEQ ID NO: 2032 - DNA, 17 bp, Artificial Sequence
  Description of Artificial Sequence: Synthetic oligonucleotide
agacacagcaaagtcat

SEQ ID NO: 2033 - DNA, 17 bp, Artificial Sequence
  Description of Artificial Sequence: Synthetic oligonucleotide
tagacacagcaaagtca

SEQ ID NO: 2034 - DNA, 17 bp, Artificial Sequence
  Description of Artificial Sequence: Synthetic oligonucleotide
ttagacacagcaaagtc

SEQ ID NO: 2035 - DNA, 17 bp, Artificial Sequence
  Description of Artificial Sequence: Synthetic oligonucleotide
cttccttccttaaagaa

SEQ ID NO: 2036 - DNA, 17 bp, Artificial Sequence
  Description of Artificial Sequence: Synthetic oligonucleotide
acttccttccttaaaga

SEQ ID NO: 2037 - DNA, 17 bp, Artificial Sequence
  Description of Artificial Sequence: Synthetic oligonucleotide
aacttccttccttaaag

SEQ ID NO: 2038 - DNA, 17 bp, Artificial Sequence
  Description of Artificial Sequence: Synthetic oligonucleotide
gaacttccttccttaaa

SEQ ID NO: 2039 - DNA, 17 bp, Artificial Sequence
  Description of Artificial Sequence: Synthetic oligonucleotide
agaacttccttccttaa

SEQ ID NO: 2040 - DNA, 17 bp, Artificial Sequence
  Description of Artificial Sequence: Synthetic oligonucleotide
cagaacttccttcctta

SEQ ID NO: 2041 - DNA, 17 bp, Artificial Sequence
  Description of Artificial Sequence: Synthetic oligonucleotide
acagaacttccttcctt

SEQ ID NO: 2042 - DNA, 17 bp, Artificial Sequence
  Description of Artificial Sequence: Synthetic oligonucleotide
aacagaacttccttcct

SEQ ID NO: 2043 - DNA, 17 bp, Artificial Sequence
  Description of Artificial Sequence: Synthetic oligonucleotide
caacagaacttccttcc

SEQ ID NO: 2044 - DNA, 17 bp, Artificial Sequence
  Description of Artificial Sequence: Synthetic oligonucleotide
tcaacagaacttccttc

SEQ ID NO: 2045 - DNA, 17 bp, Artificial Sequence
  Description of Artificial Sequence: Synthetic oligonucleotide
ttcaacagaacttcctt

SEQ ID NO: 2046 - DNA, 17 bp, Artificial Sequence
  Description of Artificial Sequence: Synthetic oligonucleotide
aaagaagaagtgtttta

SEQ ID NO: 2047 - DNA, 17 bp, Artificial Sequence
  Description of Artificial Sequence: Synthetic oligonucleotide
caaagaagaagtgtttt

SEQ ID NO: 2048 - DNA, 17 bp, Artificial Sequence
  Description of Artificial Sequence: Synthetic oligonucleotide
gcaaagaagaagtgttt

SEQ ID NO: 2049 - DNA, 17 bp, Artificial Sequence
  Description of Artificial Sequence: Synthetic oligonucleotide
agcaaagaagaagtgtt

SEQ ID NO: 2050 - DNA, 17 bp, Artificial Sequence
  Description of Artificial Sequence: Synthetic oligonucleotide
gagcaaagaagaagtgt

SEQ ID NO: 2051 - DNA, 17 bp, Artificial Sequence
  Description of Artificial Sequence: Synthetic oligonucleotide
tgagcaaagaagaagtg

SEQ ID NO: 2052 - DNA, 17 bp, Artificial Sequence
  Description of Artificial Sequence: Synthetic oligonucleotide
ctgagcaaagaagaagt

SEQ ID NO: 2053 - DNA, 17 bp, Artificial Sequence
  Description of Artificial Sequence: Synthetic oligonucleotide
cctgagcaaagaagaag

SEQ ID NO: 2054 - DNA, 17 bp, Artificial Sequence
  Description of Artificial Sequence: Synthetic oligonucleotide
tcctgagcaaagaagaa

SEQ ID NO: 2055 - DNA, 17 bp, Artificial Sequence
  Description of Artificial Sequence: Synthetic oligonucleotide
atcctgagcaaagaaga

SEQ ID NO: 2056 - DNA, 17 bp, Artificial Sequence
  Description of Artificial Sequence: Synthetic oligonucleotide
catcctgagcaaagaag

SEQ ID NO: 2057 - DNA, 17 bp, Artificial Sequence
  Description of Artificial Sequence: Synthetic oligonucleotide
ccatcctgagcaaagaa

SEQ ID NO: 2058 - DNA, 17 bp, Artificial Sequence
  Description of Artificial Sequence: Synthetic oligonucleotide
atatcacacattgttgg

SEQ ID NO: 2059 - DNA, 17 bp, Artificial Sequence
  Description of Artificial Sequence: Synthetic oligonucleotide
gatatcacacattgttg

SEQ ID NO: 2060 - DNA, 17 bp, Artificial Sequence
  Description of Artificial Sequence: Synthetic oligonucleotide
tgatatcacacattgtt

SEQ ID NO: 2061 - DNA, 17 bp, Artificial Sequence
  Description of Artificial Sequence: Synthetic oligonucleotide
ctgatatcacacattgt

SEQ ID NO: 2062 - DNA, 17 bp, Artificial Sequence
  Description of Artificial Sequence: Synthetic oligonucleotide
tctgatatcacacattg

SEQ ID NO: 2063 - DNA, 17 bp, Artificial Sequence
  Description of Artificial Sequence: Synthetic oligonucleotide
gtctgatatcacacatt

SEQ ID NO: 2064 - DNA, 17 bp, Artificial Sequence
  Description of Artificial Sequence: Synthetic oligonucleotide
tgtctgatatcacacat

SEQ ID NO: 2065 - DNA, 17 bp, Artificial Sequence
  Description of Artificial Sequence: Synthetic oligonucleotide
ttgtctgatatcacaca

SEQ ID NO: 2066 - DNA, 17 bp, Artificial Sequence
  Description of Artificial Sequence: Synthetic oligonucleotide
gttgtctgatatcacac

SEQ ID NO: 2067 - DNA, 17 bp, Artificial Sequence
  Description of Artificial Sequence: Synthetic oligonucleotide
agttgtctgatatcaca

SEQ ID NO: 2068 - DNA, 17 bp, Artificial Sequence
  Description of Artificial Sequence: Synthetic oligonucleotide
tcaacaacttcaactac

SEQ ID NO: 2069 - DNA, 17 bp, Artificial Sequence
  Description of Artificial Sequence: Synthetic oligonucleotide
atcaacaacttcaacta

SEQ ID NO: 2070 - DNA, 17 bp, Artificial Sequence
  Description of Artificial Sequence: Synthetic oligonucleotide
tatcaacaacttcaact

SEQ ID NO: 2071 - DNA, 17 bp, Artificial Sequence
  Description of Artificial Sequence: Synthetic oligonucleotide
ttatcaacaacttcaac

SEQ ID NO: 2072 - DNA, 17 bp, Artificial Sequence
  Description of Artificial Sequence: Synthetic oligonucleotide
tcgtaacaatcaaagta

SEQ ID NO: 2073 - DNA, 17 bp, Artificial Sequence
  Description of Artificial Sequence: Synthetic oligonucleotide
atcgtaacaatcaaagt

SEQ ID NO: 2074 - DNA, 17 bp, Artificial Sequence
  Description of Artificial Sequence: Synthetic oligonucleotide
catcgtaacaatcaaag

SEQ ID NO: 2075 - DNA, 17 bp, Artificial Sequence
  Description of Artificial Sequence: Synthetic oligonucleotide
ccatcgtaacaatcaaa

SEQ ID NO: 2076 - DNA, 17 bp, Artificial Sequence
  Description of Artificial Sequence: Synthetic oligonucleotide
accatcgtaacaatcaa

SEQ ID NO: 2077 - DNA, 17 bp, Artificial Sequence
  Description of Artificial Sequence: Synthetic oligonucleotide
caccatcgtaacaatca

SEQ ID NO: 2078 - DNA, 17 bp, Artificial Sequence
  Description of Artificial Sequence: Synthetic oligonucleotide
ccaccatcgtaacaatc

SEQ ID NO: 2079 - DNA, 17 bp, Artificial Sequence
  Description of Artificial Sequence: Synthetic oligonucleotide
gccaccatcgtaacaat

SEQ ID NO: 2080 - DNA, 17 bp, Artificial Sequence
  Description of Artificial Sequence: Synthetic oligonucleotide
agccaccatcgtaacaa

SEQ ID NO: 2081 - DNA, 17 bp, Artificial Sequence
  Description of Artificial Sequence: Synthetic oligonucleotide
cagccaccatcgtaaca

SEQ ID NO: 2082 - DNA, 17 bp, Artificial Sequence
  Description of Artificial Sequence: Synthetic oligonucleotide
acagccaccatcgtaac

SEQ ID NO: 2083 - DNA, 17 bp, Artificial Sequence
  Description of Artificial Sequence: Synthetic oligonucleotide
tacagccaccatcgtaa

SEQ ID NO: 2084 - DNA, 17 bp, Artificial Sequence
  Description of Artificial Sequence: Synthetic oligonucleotide
atacagccaccatcgta

SEQ ID NO: 2085 - DNA, 17 bp, Artificial Sequence
  Description of Artificial Sequence: Synthetic oligonucleotide
ctagccttaccccattt

SEQ ID NO: 2086 - DNA, 17 bp, Artificial Sequence
  Description of Artificial Sequence: Synthetic oligonucleotide
tctagccttaccccatt

SEQ ID NO: 2087 - DNA, 17 bp, Artificial Sequence
  Description of Artificial Sequence: Synthetic oligonucleotide
gtctagccttaccccat

SEQ ID NO: 2088 - DNA, 17 bp, Artificial Sequence
  Description of Artificial Sequence: Synthetic oligonucleotide
agtctagccttacccca

SEQ ID NO: 2089 - DNA, 17 bp, Artificial Sequence
  Description of Artificial Sequence: Synthetic oligonucleotide
aagtctagccttacccc

SEQ ID NO: 2090 - DNA, 17 bp, Artificial Sequence
  Description of Artificial Sequence: Synthetic oligonucleotide
aaagtctagccttaccc

SEQ ID NO: 2091 - DNA, 17 bp, Artificial Sequence
  Description of Artificial Sequence: Synthetic oligonucleotide
taaagtctagccttacc

SEQ ID NO: 2092 - DNA, 17 bp, Artificial Sequence
  Description of Artificial Sequence: Synthetic oligonucleotide
ataaagtctagccttac

SEQ ID NO: 2093 - DNA, 17 bp, Artificial Sequence
  Description of Artificial Sequence: Synthetic oligonucleotide
aataaagtctagcctta

SEQ ID NO: 2094 - DNA, 17 bp, Artificial Sequence
  Description of Artificial Sequence: Synthetic oligonucleotide
taataaagtctagcctt

SEQ ID NO: 2095 - DNA, 17 bp, Artificial Sequence
  Description of Artificial Sequence: Synthetic oligonucleotide
ataataaagtctagcct

SEQ ID NO: 2096 - DNA, 17 bp, Artificial Sequence
  Description of Artificial Sequence: Synthetic oligonucleotide
cataataaagtctagcc

SEQ ID NO: 2097 - DNA, 17 bp, Artificial Sequence
  Description of Artificial Sequence: Synthetic oligonucleotide
tcataataaagtctagc

SEQ ID NO: 2098 - DNA, 17 bp, Artificial Sequence
  Description of Artificial Sequence: Synthetic oligonucleotide
tcctcataactcattga

SEQ ID NO: 2099 - DNA, 17 bp, Artificial Sequence
  Description of Artificial Sequence: Synthetic oligonucleotide
atcctcataactcattg

SEQ ID NO: 2100 - DNA, 17 bp, Artificial Sequence
  Description of Artificial Sequence: Synthetic oligonucleotide
gatcctcataactcatt

SEQ ID NO: 2101 - DNA, 17 bp, Artificial Sequence
  Description of Artificial Sequence: Synthetic oligonucleotide
tgatcctcataactcat

SEQ ID NO: 2102 - DNA, 17 bp, Artificial Sequence
  Description of Artificial Sequence: Synthetic oligonucleotide
ttgatcctcataactca

SEQ ID NO: 2103 - DNA, 17 bp, Artificial Sequence
  Description of Artificial Sequence: Synthetic oligonucleotide
cttgatcctcataactc

SEQ ID NO: 2104 - DNA, 17 bp, Artificial Sequence
  Description of Artificial Sequence: Synthetic oligonucleotide
tcttgatcctcataact

SEQ ID NO: 2105 - DNA, 17 bp, Artificial Sequence
  Description of Artificial Sequence: Synthetic oligonucleotide
atcttgatcctcataac

SEQ ID NO: 2106 - DNA, 17 bp, Artificial Sequence
  Description of Artificial Sequence: Synthetic oligonucleotide
catcttgatcctcataa

SEQ ID NO: 2107 - DNA, 17 bp, Artificial Sequence
  Description of Artificial Sequence: Synthetic oligonucleotide
gcatcttgatcctcata

SEQ ID NO: 2108 - DNA, 17 bp, Artificial Sequence
  Description of Artificial Sequence: Synthetic oligonucleotide
tgcatcttgatcctcat

SEQ ID NO: 2109 - DNA, 17 bp, Artificial Sequence
  Description of Artificial Sequence: Synthetic oligonucleotide
gtgcatcttgatcctca

SEQ ID NO: 2110 - DNA, 17 bp, Artificial Sequence
  Description of Artificial Sequence: Synthetic oligonucleotide
agtgcatcttgatcctc

SEQ ID NO: 2111 - DNA, 17 bp, Artificial Sequence
  Description of Artificial Sequence: Synthetic oligonucleotide
gtagggatgacattacg

SEQ ID NO: 2112 - DNA, 17 bp, Artificial Sequence
  Description of Artificial Sequence: Synthetic oligonucleotide
agattcatttgagttat

SEQ ID NO: 2113 - DNA, 17 bp, Artificial Sequence
  Description of Artificial Sequence: Synthetic oligonucleotide
aagattcatttgagtta

SEQ ID NO: 2114 - DNA, 17 bp, Artificial Sequence
  Description of Artificial Sequence: Synthetic oligonucleotide
taagattcatttgagtt

SEQ ID NO: 2115 - DNA, 17 bp, Artificial Sequence
  Description of Artificial Sequence: Synthetic oligonucleotide
ttaagattcatttgagt

SEQ ID NO: 2116 - DNA, 17 bp, Artificial Sequence
  Description of Artificial Sequence: Synthetic oligonucleotide
cttaagattcatttgag

SEQ ID NO: 2117 - DNA, 17 bp, Artificial Sequence
  Description of Artificial Sequence: Synthetic oligonucleotide
acttaagattcatttga

SEQ ID NO: 2118 - DNA, 17 bp, Artificial Sequence
  Description of Artificial Sequence: Synthetic oligonucleotide
tacttaagattcatttg

SEQ ID NO: 2119 - DNA, 17 bp, Artificial Sequence
  Description of Artificial Sequence: Synthetic oligonucleotide
atacttaagattcattt

SEQ ID NO: 2120 - DNA, 17 bp, Artificial Sequence
  Description of Artificial Sequence: Synthetic oligonucleotide
catacttaagattcatt

SEQ ID NO: 2121 - DNA, 17 bp, Artificial Sequence
  Description of Artificial Sequence: Synthetic oligonucleotide
gcatacttaagattcat

SEQ ID NO: 2122 - DNA, 17 bp, Artificial Sequence
  Description of Artificial Sequence: Synthetic oligonucleotide
ggcatacttaagattca

SEQ ID NO: 2123 - DNA, 17 bp, Artificial Sequence
  Description of Artificial Sequence: Synthetic oligonucleotide
tggcatacttaagattc

SEQ ID NO: 2124 - DNA, 17 bp, Artificial Sequence
  Description of Artificial Sequence: Synthetic oligonucleotide
atggcatacttaagatt

SEQ ID NO: 2125 - DNA, 17 bp, Artificial Sequence
  Description of Artificial Sequence: Synthetic oligonucleotide
aatggcatacttaagat

SEQ ID NO: 2126 - DNA, 17 bp, Artificial Sequence
  Description of Artificial Sequence: Synthetic oligonucleotide
taatggcatacttaaga

SEQ ID NO: 2127 - DNA, 17 bp, Artificial Sequence
  Description of Artificial Sequence: Synthetic oligonucleotide
ctaatggcatacttaag

SEQ ID NO: 2128 - DNA, 17 bp, Artificial Sequence
  Description of Artificial Sequence: Synthetic oligonucleotide
actaatggcatacttaa

SEQ ID NO: 2129 - DNA, 17 bp, Artificial Sequence
  Description of Artificial Sequence: Synthetic oligonucleotide
cactaatggcatactta

SEQ ID NO: 2130 - DNA, 17 bp, Artificial Sequence
  Description of Artificial Sequence: Synthetic oligonucleotide
gcactaatggcatactt

SEQ ID NO: 2131 - DNA, 17 bp, Artificial Sequence
  Description of Artificial Sequence: Synthetic oligonucleotide
tgcactaatggcatact

SEQ ID NO: 2132 - DNA, 17 bp, Artificial Sequence
  Description of Artificial Sequence: Synthetic oligonucleotide
ttgcactaatggcatac

SEQ ID NO: 2133 - DNA, 17 bp, Artificial Sequence
  Description of Artificial Sequence: Synthetic oligonucleotide
tttgcactaatggcata

SEQ ID NO: 2134 - DNA, 17 bp, Artificial Sequence
  Description of Artificial Sequence: Synthetic oligonucleotide
ctttgcactaatggcat

SEQ ID NO: 2135 - DNA, 17 bp, Artificial Sequence
  Description of Artificial Sequence: Synthetic oligonucleotide
tctttgcactaatggca

SEQ ID NO: 2136 - DNA, 17 bp, Artificial Sequence
  Description of Artificial Sequence: Synthetic oligonucleotide
ttctttgcactaatggc

SEQ ID NO: 2137 - DNA, 17 bp, Artificial Sequence
  Description of Artificial Sequence: Synthetic oligonucleotide
attctttgcactaatgg

SEQ ID NO: 2138 - DNA, 17 bp, Artificial Sequence
  Description of Artificial Sequence: Synthetic oligonucleotide
tattctttgcactaatg

SEQ ID NO: 2139 - DNA, 17 bp, Artificial Sequence
  Description of Artificial Sequence: Synthetic oligonucleotide
ctattctttgcactaat

SEQ ID NO: 2140 - DNA, 17 bp, Artificial Sequence
  Description of Artificial Sequence: Synthetic oligonucleotide
tctattctttgcactaa

SEQ ID NO: 2141 - DNA, 17 bp, Artificial Sequence
  Description of Artificial Sequence: Synthetic oligonucleotide
ctctattctttgcacta

SEQ ID NO: 2142 - DNA, 17 bp, Artificial Sequence
  Description of Artificial Sequence: Synthetic oligonucleotide
gctctattctttgcact

SEQ ID NO: 2143 - DNA, 17 bp, Artificial Sequence
  Description of Artificial Sequence: Synthetic oligonucleotide
agctctattctttgcac

SEQ ID NO: 2144 - DNA, 17 bp, Artificial Sequence
  Description of Artificial Sequence: Synthetic oligonucleotide
gagctctattctttgca

SEQ ID NO: 2145 - DNA, 17 bp, Artificial Sequence
  Description of Artificial Sequence: Synthetic oligonucleotide
cgagctctattctttgc

SEQ ID NO: 2146 - DNA, 17 bp, Artificial Sequence
  Description of Artificial Sequence: Synthetic oligonucleotide
gcgagctctattctttg

SEQ ID NO: 2147 - DNA, 17 bp, Artificial Sequence
  Description of Artificial Sequence: Synthetic oligonucleotide
tgcgagctctattcttt

SEQ ID NO: 2148 - DNA, 17 bp, Artificial Sequence
  Description of Artificial Sequence: Synthetic oligonucleotide
gtgcgagctctattctt

SEQ ID NO: 2149 - DNA, 17 bp, Artificial Sequence
  Description of Artificial Sequence: Synthetic oligonucleotide
ggtgcgagctctattct

SEQ ID NO: 2150 - DNA, 17 bp, Artificial Sequence
  Description of Artificial Sequence: Synthetic oligonucleotide
cggtgcgagctctattc

SEQ ID NO: 2151 - DNA, 17 bp, Artificial Sequence
  Description of Artificial Sequence: Synthetic oligonucleotide
acggtgcgagctctatt

SEQ ID NO: 2152 - DNA, 17 bp, Artificial Sequence
  Description of Artificial Sequence: Synthetic oligonucleotide
tacggtgcgagctctat

SEQ ID NO: 2153 - DNA, 17 bp, Artificial Sequence
  Description of Artificial Sequence: Synthetic oligonucleotide
ctacggtgcgagctcta

SEQ ID NO: 2154 - DNA, 17 bp, Artificial Sequence
  Description of Artificial Sequence: Synthetic oligonucleotide
gctacggtgcgagctct

SEQ ID NO: 2155 - DNA, 17 bp, Artificial Sequence
  Description of Artificial Sequence: Synthetic oligonucleotide
agctacggtgcgagctc

SEQ ID NO: 2156 - DNA, 17 bp, Artificial Sequence
  Description of Artificial Sequence: Synthetic oligonucleotide
cagctacggtgcgagct

SEQ ID NO: 2157 - DNA, 17 bp, Artificial Sequence
  Description of Artificial Sequence: Synthetic oligonucleotide
ccagctacggtgcgagc

SEQ ID NO: 2158 - DNA, 17 bp, Artificial Sequence
  Description of Artificial Sequence: Synthetic oligonucleotide
accagctacggtgcgag

SEQ ID NO: 2159 - DNA, 17 bp, Artificial Sequence
  Description of Artificial Sequence: Synthetic oligonucleotide
caccagctacggtgcga

SEQ ID NO: 2160 - DNA, 17 bp, Artificial Sequence
  Description of Artificial Sequence: Synthetic oligonucleotide
acaccagctacggtgcg

SEQ ID NO: 2161 - DNA, 17 bp, Artificial Sequence
  Description of Artificial Sequence: Synthetic oligonucleotide
gacaccagctacggtgc

SEQ ID NO: 2162 - DNA, 17 bp, Artificial Sequence
  Description of Artificial Sequence: Synthetic oligonucleotide
agacaccagctacggtg

SEQ ID NO: 2163 - DNA, 17 bp, Artificial Sequence
  Description of Artificial Sequence: Synthetic oligonucleotide
gagacaccagctacggt

SEQ ID NO: 2164 - DNA, 17 bp, Artificial Sequence
  Description of Artificial Sequence: Synthetic oligonucleotide
agagacaccagctacgg

SEQ ID NO: 2165 - DNA, 17 bp, Artificial Sequence
  Description of Artificial Sequence: Synthetic oligonucleotide
tagagacaccagctacg

SEQ ID NO: 2166 - DNA, 17 bp, Artificial Sequence
  Description of Artificial Sequence: Synthetic oligonucleotide
atagagacaccagctac

SEQ ID NO: 2167 - DNA, 17 bp, Artificial Sequence
  Description of Artificial Sequence: Synthetic oligonucleotide
gatagagacaccagcta

SEQ ID NO: 2168 - DNA, 17 bp, Artificial Sequence
  Description of Artificial Sequence: Synthetic oligonucleotide
agatagagacaccagct

SEQ ID NO: 2169 - DNA, 17 bp, Artificial Sequence
  Description of Artificial Sequence: Synthetic oligonucleotide
cagatagagacaccagc

SEQ ID NO: 2170 - DNA, 17 bp, Artificial Sequence
  Description of Artificial Sequence: Synthetic oligonucleotide
acagatagagacaccag

SEQ ID NO: 2171 - DNA, 17 bp, Artificial Sequence
  Description of Artificial Sequence: Synthetic oligonucleotide
tacagatagagacacca

SEQ ID NO: 2172 - DNA, 17 bp, Artificial Sequence
  Description of Artificial Sequence: Synthetic oligonucleotide
ctacagatagagacacc

SEQ ID NO: 2173 - DNA, 17 bp, Artificial Sequence
  Description of Artificial Sequence: Synthetic oligonucleotide
actacagatagagacac

SEQ ID NO: 2174 - DNA, 17 bp, Artificial Sequence
  Description of Artificial Sequence: Synthetic oligonucleotide
tactacagatagagaca

SEQ ID NO: 2175 - DNA, 17 bp, Artificial Sequence
  Description of Artificial Sequence: Synthetic oligonucleotide
gtactacagatagagac

SEQ ID NO: 2176 - DNA, 17 bp, Artificial Sequence
  Description of Artificial Sequence: Synthetic oligonucleotide
agtactacagatagaga

SEQ ID NO: 2177 - DNA, 17 bp, Artificial Sequence
  Description of Artificial Sequence: Synthetic oligonucleotide
tagtactacagatagag

SEQ ID NO: 2178 - DNA, 17 bp, Artificial Sequence
  Description of Artificial Sequence: Synthetic oligonucleotide
atagtactacagataga

SEQ ID NO: 2179 - DNA, 17 bp, Artificial Sequence
  Description of Artificial Sequence: Synthetic oligonucleotide
catagtactacagatag

SEQ ID NO: 2180 - DNA, 17 bp, Artificial Sequence
  Description of Artificial Sequence: Synthetic oligonucleotide
tcatagtactacagata

SEQ ID NO: 2181 - DNA, 17 bp, Artificial Sequence
  Description of Artificial Sequence: Synthetic oligonucleotide
gtcatagtactacagat

SEQ ID NO: 2182 - DNA, 17 bp, Artificial Sequence
  Description of Artificial Sequence: Synthetic oligonucleotide
tgatgaaactgtctatt

SEQ ID NO: 2183 - DNA, 17 bp, Artificial Sequence
  Description of Artificial Sequence: Synthetic oligonucleotide
ctagtggcggctattga

SEQ ID NO: 2184 - DNA, 17 bp, Artificial Sequence
  Description of Artificial Sequence: Synthetic oligonucleotide
tctagtggcggctattg

SEQ ID NO: 2185 - DNA, 17 bp, Artificial Sequence
  Description of Artificial Sequence: Synthetic oligonucleotide
ctctagtggcggctatt

SEQ ID NO: 2186 - DNA, 17 bp, Artificial Sequence
  Description of Artificial Sequence: Synthetic oligonucleotide
cctctagtggcggctat

SEQ ID NO: 2187 - DNA, 17 bp, Artificial Sequence
  Description of Artificial Sequence: Synthetic oligonucleotide
tcctctagtggcggcta

SEQ ID NO: 2188 - DNA, 17 bp, Artificial Sequence
  Description of Artificial Sequence: Synthetic oligonucleotide
ctcctctagtggcggct

SEQ ID NO: 2189 - DNA, 17 bp, Artificial Sequence
  Description of Artificial Sequence: Synthetic oligonucleotide
gctcctctagtggcggc

SEQ ID NO: 2190 - DNA, 17 bp, Artificial Sequence
  Description of Artificial Sequence: Synthetic oligonucleotide
agctcctctagtggcgg

SEQ ID NO: 2191 - DNA, 17 bp, Artificial Sequence
  Description of Artificial Sequence: Synthetic oligonucleotide
tagctcctctagtggcg

SEQ ID NO: 2192 - DNA, 17 bp, Artificial Sequence
  Description of Artificial Sequence: Synthetic oligonucleotide
gtagctcctctagtggc

SEQ ID NO: 2193 - DNA, 17 bp, Artificial Sequence
  Description of Artificial Sequence: Synthetic oligonucleotide
agtagctcctctagtgg

SEQ ID NO: 2194 - DNA, 17 bp, Artificial Sequence
  Description of Artificial Sequence: Synthetic oligonucleotide
cagtagctcctctagtg

SEQ ID NO: 2195 - DNA, 17 bp, Artificial Sequence
  Description of Artificial Sequence: Synthetic oligonucleotide
acagtagctcctctagt

SEQ ID NO: 2196 - DNA, 17 bp, Artificial Sequence
  Description of Artificial Sequence: Synthetic oligonucleotide
ttgcttgttccaattac

SEQ ID NO: 2197 - DNA, 17 bp, Artificial Sequence
  Description of Artificial Sequence: Synthetic oligonucleotide
taaacagtttttaacat

SEQ ID NO: 2198 - DNA, 17 bp, Artificial Sequence
  Description of Artificial Sequence: Synthetic oligonucleotide
tcccaacccataaggtg

SEQ ID NO: 2199 - DNA, 17 bp, Artificial Sequence
  Description of Artificial Sequence: Synthetic oligonucleotide
atgttaggcatggctct

SEQ ID NO: 2200 - DNA, 17 bp, Artificial Sequence
  Description of Artificial Sequence: Synthetic oligonucleotide
catgttaggcatggctc

SEQ ID NO: 2201 - DNA, 17 bp, Artificial Sequence
  Description of Artificial Sequence: Synthetic oligonucleotide
gcatgttaggcatggct

SEQ ID NO: 2202 - DNA, 17 bp, Artificial Sequence
  Description of Artificial Sequence: Synthetic oligonucleotide
agcatgttaggcatggc

SEQ ID NO: 2203 - DNA, 17 bp, Artificial Sequence
  Description of Artificial Sequence: Synthetic oligonucleotide
aagcatgttaggcatgg

SEQ ID NO: 2204 - DNA, 17 bp, Artificial Sequence
  Description of Artificial Sequence: Synthetic oligonucleotide
taagcatgttaggcatg

SEQ ID NO: 2205 - DNA, 17 bp, Artificial Sequence
  Description of Artificial Sequence: Synthetic oligonucleotide
ctaagcatgttaggcat

SEQ ID NO: 2206 - DNA, 17 bp, Artificial Sequence
  Description of Artificial Sequence: Synthetic oligonucleotide
ttgcgagcaagaacaag

SEQ ID NO: 2207 - DNA, 17 bp, Artificial Sequence
  Description of Artificial Sequence: Synthetic oligonucleotide
tttgcgagcaagaacaa

SEQ ID NO: 2208 - DNA, 17 bp, Artificial Sequence
  Description of Artificial Sequence: Synthetic oligonucleotide
gtttgcgagcaagaaca

SEQ ID NO: 2209 - DNA, 17 bp, Artificial Sequence
  Description of Artificial Sequence: Synthetic oligonucleotide
tgtttgcgagcaagaac

SEQ ID NO: 2210 - DNA, 17 bp, Artificial Sequence
  Description of Artificial Sequence: Synthetic oligonucleotide
atgtttgcgagcaagaa

SEQ ID NO: 2211 - DNA, 17 bp, Artificial Sequence
  Description of Artificial Sequence: Synthetic oligonucleotide
tatgtttgcgagcaaga

SEQ ID NO: 2212 - DNA, 17 bp, Artificial Sequence
  Description of Artificial Sequence: Synthetic oligonucleotide
ccgccacacatgaccat

SEQ ID NO: 2213 - DNA, 17 bp, Artificial Sequence
  Description of Artificial Sequence: Synthetic oligonucleotide
ttagcataagcagttgt

SEQ ID NO: 2214 - DNA, 17 bp, Artificial Sequence
  Description of Artificial Sequence: Synthetic oligonucleotide
attagcataagcagttg

SEQ ID NO: 2215 - DNA, 17 bp, Artificial Sequence
  Description of Artificial Sequence: Synthetic oligonucleotide
tattagcataagcagtt

SEQ ID NO: 2216 - DNA, 17 bp, Artificial Sequence
  Description of Artificial Sequence: Synthetic oligonucleotide
ctattagcataagcagt

SEQ ID NO: 2217 - DNA, 17 bp, Artificial Sequence
  Description of Artificial Sequence: Synthetic oligonucleotide
actattagcataagcag

SEQ ID NO: 2218 - DNA, 17 bp, Artificial Sequence
  Description of Artificial Sequence: Synthetic oligonucleotide
cactattagcataagca

SEQ ID NO: 2219 - DNA, 17 bp, Artificial Sequence
  Description of Artificial Sequence: Synthetic oligonucleotide
acactattagcataagc

SEQ ID NO: 2220 - DNA, 17 bp, Artificial Sequence
  Description of Artificial Sequence: Synthetic oligonucleotide
gcttgacaaatgttaaa

SEQ ID NO: 2221 - DNA, 17 bp, Artificial Sequence
  Description of Artificial Sequence: Synthetic oligonucleotide
ctatagagacactcata

SEQ ID NO: 2222 - DNA, 17 bp, Artificial Sequence
  Description of Artificial Sequence: Synthetic oligonucleotide
tctatagagacactcat

SEQ ID NO: 2223 - DNA, 17 bp, Artificial Sequence
  Description of Artificial Sequence: Synthetic oligonucleotide
ttctatagagacactca

SEQ ID NO: 2224 - DNA, 17 bp, Artificial Sequence
  Description of Artificial Sequence: Synthetic oligonucleotide
tttctatagagacactc

SEQ ID NO: 2225 - DNA, 17 bp, Artificial Sequence
  Description of Artificial Sequence: Synthetic oligonucleotide
atttctatagagacact

SEQ ID NO: 2226 - DNA, 17 bp, Artificial Sequence
  Description of Artificial Sequence: Synthetic oligonucleotide
tatttctatagagacac

SEQ ID NO: 2227 - DNA, 17 bp, Artificial Sequence
  Description of Artificial Sequence: Synthetic oligonucleotide
ctatttctatagagaca

SEQ ID NO: 2228 - DNA, 17 bp, Artificial Sequence
  Description of Artificial Sequence: Synthetic oligonucleotide
aggtcagtctcagtcca

SEQ ID NO: 2229 - DNA, 17 bp, Artificial Sequence
  Description of Artificial Sequence: Synthetic oligonucleotide
aaggtcagtctcagtcc

SEQ ID NO: 2230 - DNA, 17 bp, Artificial Sequence
  Description of Artificial Sequence: Synthetic oligonucleotide
taaggtcagtctcagtc

SEQ ID NO: 2231 - DNA, 17 bp, Artificial Sequence
  Description of Artificial Sequence: Synthetic oligonucleotide
gtaaggtcagtctcagt

SEQ ID NO: 2232 - DNA, 17 bp, Artificial Sequence
  Description of Artificial Sequence: Synthetic oligonucleotide
agtaaggtcagtctcag

SEQ ID NO: 2233 - DNA, 17 bp, Artificial Sequence
  Description of Artificial Sequence: Synthetic oligonucleotide
tagtaaggtcagtctca

SEQ ID NO: 2234 - DNA, 17 bp, Artificial Sequence
  Description of Artificial Sequence: Synthetic oligonucleotide
ttagtaaggtcagtctc

SEQ ID NO: 2235 - DNA, 17 bp, Artificial Sequence
  Description of Artificial Sequence: Synthetic oligonucleotide
tttagtaaggtcagtct

SEQ ID NO: 2236 - DNA, 17 bp, Artificial Sequence
  Description of Artificial Sequence: Synthetic oligonucleotide
ctttagtaaggtcagtc

SEQ ID NO: 2237 - DNA, 17 bp, Artificial Sequence
  Description of Artificial Sequence: Synthetic oligonucleotide
cctttagtaaggtcagt

SEQ ID NO: 2238 - DNA, 17 bp, Artificial Sequence
  Description of Artificial Sequence: Synthetic oligonucleotide
tcctttagtaaggtcag

SEQ ID NO: 2239 - DNA, 17 bp, Artificial Sequence
  Description of Artificial Sequence: Synthetic oligonucleotide
gtcctttagtaaggtca

SEQ ID NO: 2240 - DNA, 17 bp, Artificial Sequence
  Description of Artificial Sequence: Synthetic oligonucleotide
ggtcctttagtaaggtc

SEQ ID NO: 2241 - DNA, 17 bp, Artificial Sequence
  Description of Artificial Sequence: Synthetic oligonucleotide
aggtcctttagtaaggt

SEQ ID NO: 2242 - DNA, 17 bp, Artificial Sequence
  Description of Artificial Sequence: Synthetic oligonucleotide
gaggtcctttagtaagg

SEQ ID NO: 2243 - DNA, 17 bp, Artificial Sequence
  Description of Artificial Sequence: Synthetic oligonucleotide
tgaggtcctttagtaag

SEQ ID NO: 2244 - DNA, 17 bp, Artificial Sequence
  Description of Artificial Sequence: Synthetic oligonucleotide
ttaactagcattgtatg

SEQ ID NO: 2245 - DNA, 17 bp, Artificial Sequence
  Description of Artificial Sequence: Synthetic oligonucleotide
tttaactagcattgtat

SEQ ID NO: 2246 - DNA, 17 bp, Artificial Sequence
  Description of Artificial Sequence: Synthetic oligonucleotide
gtttaactagcattgta

SEQ ID NO: 2247 - DNA, 17 bp, Artificial Sequence
  Description of Artificial Sequence: Synthetic oligonucleotide
tgtttaactagcattgt

SEQ ID NO: 2248 - DNA, 17 bp, Artificial Sequence
  Description of Artificial Sequence: Synthetic oligonucleotide
gatggatctgggtaagg

SEQ ID NO: 2249 - DNA, 17 bp, Artificial Sequence
  Description of Artificial Sequence: Synthetic oligonucleotide
agtgtaccatctgtttt

SEQ ID NO: 2250 - DNA, 17 bp, Artificial Sequence
  Description of Artificial Sequence: Synthetic oligonucleotide
aagtgtaccatctgttt

SEQ ID NO: 2251 - DNA, 17 bp, Artificial Sequence
  Description of Artificial Sequence: Synthetic oligonucleotide
taagtgtaccatctgtt

SEQ ID NO: 2252 - DNA, 17 bp, Artificial Sequence
  Description of Artificial Sequence: Synthetic oligonucleotide
ataagtgtaccatctgt

SEQ ID NO: 2253 - DNA, 17 bp, Artificial Sequence
  Description of Artificial Sequence: Synthetic oligonucleotide
cataagtgtaccatctg

SEQ ID NO: 2254 - DNA, 17 bp, Artificial Sequence
  Description of Artificial Sequence: Synthetic oligonucleotide
tcataagtgtaccatct

SEQ ID NO: 2255 - DNA, 17 bp, Artificial Sequence
  Description of Artificial Sequence: Synthetic oligonucleotide
atcataagtgtaccatc

SEQ ID NO: 2256 - DNA, 17 bp, Artificial Sequence
  Description of Artificial Sequence: Synthetic oligonucleotide
aatcataagtgtaccat

SEQ ID NO: 2257 - DNA, 17 bp, Artificial Sequence
  Description of Artificial Sequence: Synthetic oligonucleotide
caatcataagtgtacca

SEQ ID NO: 2258 - DNA, 17 bp, Artificial Sequence
  Description of Artificial Sequence: Synthetic oligonucleotide
tcaatcataagtgtacc

SEQ ID NO: 2259 - DNA, 17 bp, Artificial Sequence
  Description of Artificial Sequence: Synthetic oligonucleotide
gcatactcctgattagg

SEQ ID NO: 2260 - DNA, 17 bp, Artificial Sequence
  Description of Artificial Sequence: Synthetic oligonucleotide
agcatactcctgattag

SEQ ID NO: 2261 - DNA, 17 bp, Artificial Sequence
  Description of Artificial Sequence: Synthetic oligonucleotide
cagcatactcctgatta

SEQ ID NO: 2262 - DNA, 17 bp, Artificial Sequence
  Description of Artificial Sequence: Synthetic oligonucleotide
tcagcatactcctgatt

SEQ ID NO: 2263 - DNA, 17 bp, Artificial Sequence
  Description of Artificial Sequence: Synthetic oligonucleotide
atcagcatactcctgat

SEQ ID NO: 2264 - DNA, 17 bp, Artificial Sequence
  Description of Artificial Sequence: Synthetic oligonucleotide
catcagcatactcctga

SEQ ID NO: 2265 - DNA, 17 bp, Artificial Sequence
  Description of Artificial Sequence: Synthetic oligonucleotide
acatcagcatactcctg

SEQ ID NO: 2266 - DNA, 17 bp, Artificial Sequence
  Description of Artificial Sequence: Synthetic oligonucleotide
taaaactcaggttccca

SEQ ID NO: 2267 - DNA, 17 bp, Artificial Sequence
  Description of Artificial Sequence: Synthetic oligonucleotide
ataaaactcaggttccc

SEQ ID NO: 2268 - DNA, 17 bp, Artificial Sequence
  Description of Artificial Sequence: Synthetic oligonucleotide
cataaaactcaggttcc

SEQ ID NO: 2269 - DNA, 17 bp, Artificial Sequence
  Description of Artificial Sequence: Synthetic oligonucleotide
tcataaaactcaggttc

SEQ ID NO: 2270 - DNA, 17 bp, Artificial Sequence
  Description of Artificial Sequence: Synthetic oligonucleotide
atagctcatacctccta

SEQ ID NO: 2271 - DNA, 17 bp, Artificial Sequence
  Description of Artificial Sequence: Synthetic oligonucleotide
aatagctcatacctcct

SEQ ID NO: 2272 - DNA, 17 bp, Artificial Sequence
  Description of Artificial Sequence: Synthetic oligonucleotide
taatagctcatacctcc

SEQ ID NO: 2273 - DNA, 17 bp, Artificial Sequence
  Description of Artificial Sequence: Synthetic oligonucleotide
aatggaaaactaatggg

SEQ ID NO: 2274 - DNA, 17 bp, Artificial Sequence
  Description of Artificial Sequence: Synthetic oligonucleotide
taaccagtaaagacata

SEQ ID NO: 2275 - DNA, 17 bp, Artificial Sequence
  Description of Artificial Sequence: Synthetic oligonucleotide
tcaaaggtgtactctcc

SEQ ID NO: 2276 - DNA, 17 bp, Artificial Sequence
  Description of Artificial Sequence: Synthetic oligonucleotide
ttcaaaggtgtactctc

SEQ ID NO: 2277 - DNA, 17 bp, Artificial Sequence
  Description of Artificial Sequence: Synthetic oligonucleotide
tttcaaaggtgtactct

SEQ ID NO: 2278 - DNA, 17 bp, Artificial Sequence
  Description of Artificial Sequence: Synthetic oligonucleotide
ttttcaaaggtgtactc

SEQ ID NO: 2279 - DNA, 17 bp, Artificial Sequence
  Description of Artificial Sequence: Synthetic oligonucleotide
tttttcaaaggtgtact

SEQ ID NO: 2280 - DNA, 17 bp, Artificial Sequence
  Description of Artificial Sequence: Synthetic oligonucleotide
ctttttcaaaggtgtac

SEQ ID NO: 2281 - DNA, 17 bp, Artificial Sequence
  Description of Artificial Sequence: Synthetic oligonucleotide
cctttttcaaaggtgta

SEQ ID NO: 2282 - DNA, 17 bp, Artificial Sequence
  Description of Artificial Sequence: Synthetic oligonucleotide
acctttttcaaaggtgt

SEQ ID NO: 2283 - DNA, 17 bp, Artificial Sequence
  Description of Artificial Sequence: Synthetic oligonucleotide
cacctttttcaaaggtg

SEQ ID NO: 2284 - DNA, 17 bp, Artificial Sequence
  Description of Artificial Sequence: Synthetic oligonucleotide
tcacctttttcaaaggt

SEQ ID NO: 2285 - DNA, 17 bp, Artificial Sequence
  Description of Artificial Sequence: Synthetic oligonucleotide
gtcacctttttcaaagg

SEQ ID NO: 2286 - DNA, 17 bp, Artificial Sequence
  Description of Artificial Sequence: Synthetic oligonucleotide
agtcacctttttcaaag

SEQ ID NO: 2287 - DNA, 17 bp, Artificial Sequence
  Description of Artificial Sequence: Synthetic oligonucleotide
tagtcacctttttcaaa

SEQ ID NO: 2288 - DNA, 17 bp, Artificial Sequence
  Description of Artificial Sequence: Synthetic oligonucleotide
atagtcacctttttcaa

SEQ ID NO: 2289 - DNA, 17 bp, Artificial Sequence
  Description of Artificial Sequence: Synthetic oligonucleotide
catagtcacctttttca

SEQ ID NO: 2290 - DNA, 17 bp, Artificial Sequence
  Description of Artificial Sequence: Synthetic oligonucleotide
ccatagtcacctttttc

SEQ ID NO: 2291 - DNA, 17 bp, Artificial Sequence
  Description of Artificial Sequence: Synthetic oligonucleotide
accatagtcaccttttt

SEQ ID NO: 2292 - DNA, 17 bp, Artificial Sequence
  Description of Artificial Sequence: Synthetic oligonucleotide
caccatagtcacctttt

SEQ ID NO: 2293 - DNA, 17 bp, Artificial Sequence
  Description of Artificial Sequence: Synthetic oligonucleotide
tcaccatagtcaccttt

SEQ ID NO: 2294 - DNA, 17 bp, Artificial Sequence
  Description of Artificial Sequence: Synthetic oligonucleotide
atcaccatagtcacctt

SEQ ID NO: 2295 - DNA, 17 bp, Artificial Sequence
  Description of Artificial Sequence: Synthetic oligonucleotide
catcaccatagtcacct

SEQ ID NO: 2296 - DNA, 17 bp, Artificial Sequence
  Description of Artificial Sequence: Synthetic oligonucleotide
gcatcaccatagtcacc

SEQ ID NO: 2297 - DNA, 17 bp, Artificial Sequence
  Description of Artificial Sequence: Synthetic oligonucleotide
agcatcaccatagtcac

SEQ ID NO: 2298 - DNA, 17 bp, Artificial Sequence
  Description of Artificial Sequence: Synthetic oligonucleotide
cagcatcaccatagtca

SEQ ID NO: 2299 - DNA, 17 bp, Artificial Sequence
  Description of Artificial Sequence: Synthetic oligonucleotide
acagcatcaccatagtc

SEQ ID NO: 2300 - DNA, 17 bp, Artificial Sequence
  Description of Artificial Sequence: Synthetic oligonucleotide
aacagcatcaccatagt

SEQ ID NO: 2301 - DNA, 17 bp, Artificial Sequence
  Description of Artificial Sequence: Synthetic oligonucleotide
caacagcatcaccatag

SEQ ID NO: 2302 - DNA, 17 bp, Artificial Sequence
  Description of Artificial Sequence: Synthetic oligonucleotide
acaacagcatcaccata

SEQ ID NO: 2303 - DNA, 17 bp, Artificial Sequence
  Description of Artificial Sequence: Synthetic oligonucleotide
tgctcttgtggcactag

SEQ ID NO: 2304 - DNA, 17 bp, Artificial Sequence
  Description of Artificial Sequence: Synthetic oligonucleotide
gtgctcttgtggcacta

SEQ ID NO: 2305 - DNA, 17 bp, Artificial Sequence
  Description of Artificial Sequence: Synthetic oligonucleotide
agtgctcttgtggcact

SEQ ID NO: 2306 - DNA, 17 bp, Artificial Sequence
  Description of Artificial Sequence: Synthetic oligonucleotide
tagtgctcttgtggcac

SEQ ID NO: 2307 - DNA, 17 bp, Artificial Sequence
  Description of Artificial Sequence: Synthetic oligonucleotide
atagtgctcttgtggca

SEQ ID NO: 2308 - DNA, 17 bp, Artificial Sequence
  Description of Artificial Sequence: Synthetic oligonucleotide
catagtgctcttgtggc

SEQ ID NO: 2309 - DNA, 17 bp, Artificial Sequence
  Description of Artificial Sequence: Synthetic oligonucleotide
acatagtgctcttgtgg

SEQ ID NO: 2310 - DNA, 17 bp, Artificial Sequence
  Description of Artificial Sequence: Synthetic oligonucleotide
gaaaactcatctgagat

SEQ ID NO: 2311 - DNA, 17 bp, Artificial Sequence
  Description of Artificial Sequence: Synthetic oligonucleotide
agaaaactcatctgaga

SEQ ID NO: 2312 - DNA, 17 bp, Artificial Sequence
  Description of Artificial Sequence: Synthetic oligonucleotide
tagaaaactcatctgag

SEQ ID NO: 2313 - DNA, 17 bp, Artificial Sequence
  Description of Artificial Sequence: Synthetic oligonucleotide
ctagaaaactcatctga

SEQ ID NO: 2314 - DNA, 17 bp, Artificial Sequence
  Description of Artificial Sequence: Synthetic oligonucleotide
gctagaaaactcatctg

SEQ ID NO: 2315 - DNA, 17 bp, Artificial Sequence
  Description of Artificial Sequence: Synthetic oligonucleotide
tgctagaaaactcatct

SEQ ID NO: 2316 - DNA, 17 bp, Artificial Sequence
  Description of Artificial Sequence: Synthetic oligonucleotide
ttgctagaaaactcatc

SEQ ID NO: 2317 - DNA, 17 bp, Artificial Sequence
  Description of Artificial Sequence: Synthetic oligonucleotide
attgctagaaaactcat

SEQ ID NO: 2318 - DNA, 17 bp, Artificial Sequence
  Description of Artificial Sequence: Synthetic oligonucleotide
cattgctagaaaactca

SEQ ID NO: 2319 - DNA, 17 bp, Artificial Sequence
  Description of Artificial Sequence: Synthetic oligonucleotide
acattgctagaaaactc

SEQ ID NO: 2320 - DNA, 17 bp, Artificial Sequence
  Description of Artificial Sequence: Synthetic oligonucleotide
aacattgctagaaaact

SEQ ID NO: 2321 - DNA, 17 bp, Artificial Sequence
  Description of Artificial Sequence: Synthetic oligonucleotide
caacattgctagaaaac

SEQ ID NO: 2322 - DNA, 17 bp, Artificial Sequence
  Description of Artificial Sequence: Synthetic oligonucleotide
gcaacattgctagaaaa

SEQ ID NO: 2323 - DNA, 17 bp, Artificial Sequence
  Description of Artificial Sequence: Synthetic oligonucleotide
tgcaacattgctagaaa

SEQ ID NO: 2324 - DNA, 17 bp, Artificial Sequence
  Description of Artificial Sequence: Synthetic oligonucleotide
ttgcaacattgctagaa

SEQ ID NO: 2325 - DNA, 17 bp, Artificial Sequence
  Description of Artificial Sequence: Synthetic oligonucleotide
tttgcaacattgctaga

SEQ ID NO: 2326 - DNA, 17 bp, Artificial Sequence
  Description of Artificial Sequence: Synthetic oligonucleotide
atttgcaacattgctag

SEQ ID NO: 2327 - DNA, 17 bp, Artificial Sequence
  Description of Artificial Sequence: Synthetic oligonucleotide
aatttgcaacattgcta

SEQ ID NO: 2328 - DNA, 17 bp, Artificial Sequence
  Description of Artificial Sequence: Synthetic oligonucleotide
taatttgcaacattgct

SEQ ID NO: 2329 - DNA, 17 bp, Artificial Sequence
  Description of Artificial Sequence: Synthetic oligonucleotide
ccagtaccaggtggtcc

SEQ ID NO: 2330 - DNA, 17 bp, Artificial Sequence
  Description of Artificial Sequence: Synthetic oligonucleotide
accagtaccaggtggtc

SEQ ID NO: 2331 - DNA, 17 bp, Artificial Sequence
  Description of Artificial Sequence: Synthetic oligonucleotide
taccagtaccaggtggt

SEQ ID NO: 2332 - DNA, 17 bp, Artificial Sequence
  Description of Artificial Sequence: Synthetic oligonucleotide
ttaccagtaccaggtgg

SEQ ID NO: 2333 - DNA, 17 bp, Artificial Sequence
  Description of Artificial Sequence: Synthetic oligonucleotide
cttaccagtaccaggtg

SEQ ID NO: 2334 - DNA, 17 bp, Artificial Sequence
  Description of Artificial Sequence: Synthetic oligonucleotide
tcttaccagtaccaggt

SEQ ID NO: 2335 - DNA, 17 bp, Artificial Sequence
  Description of Artificial Sequence: Synthetic oligonucleotide
ctcttaccagtaccagg

SEQ ID NO: 2336 - DNA, 17 bp, Artificial Sequence
  Description of Artificial Sequence: Synthetic oligonucleotide
actcttaccagtaccag

SEQ ID NO: 2337 - DNA, 17 bp, Artificial Sequence
  Description of Artificial Sequence: Synthetic oligonucleotide
gactcttaccagtacca

SEQ ID NO: 2338 - DNA, 17 bp, Artificial Sequence
  Description of Artificial Sequence: Synthetic oligonucleotide
tgactcttaccagtacc

SEQ ID NO: 2339 - DNA, 17 bp, Artificial Sequence
  Description of Artificial Sequence: Synthetic oligonucleotide
atgactcttaccagtac

SEQ ID NO: 2340 - DNA, 17 bp, Artificial Sequence
  Description of Artificial Sequence: Synthetic oligonucleotide
aatgactcttaccagta

SEQ ID NO: 2341 - DNA, 17 bp, Artificial Sequence
  Description of Artificial Sequence: Synthetic oligonucleotide
aaatgactcttaccagt

SEQ ID NO: 2342 - DNA, 17 bp, Artificial Sequence
  Description of Artificial Sequence: Synthetic oligonucleotide
aaaatgactcttaccag

SEQ ID NO: 2343 - DNA, 17 bp, Artificial Sequence
  Description of Artificial Sequence: Synthetic oligonucleotide
caaaatgactcttacca

SEQ ID NO: 2344 - DNA, 17 bp, Artificial Sequence
  Description of Artificial Sequence: Synthetic oligonucleotide
gcaaaatgactcttacc

SEQ ID NO: 2345 - DNA, 17 bp, Artificial Sequence
  Description of Artificial Sequence: Synthetic oligonucleotide
tacactatgcgagcaga

SEQ ID NO: 2346 - DNA, 17 bp, Artificial Sequence
  Description of Artificial Sequence: Synthetic oligonucleotide
atacactatgcgagcag

SEQ ID NO: 2347 - DNA, 17 bp, Artificial Sequence
  Description of Artificial Sequence: Synthetic oligonucleotide
tatacactatgcgagca

SEQ ID NO: 2348 - DNA, 17 bp, Artificial Sequence
  Description of Artificial Sequence: Synthetic oligonucleotide
gtatacactatgcgagc

SEQ ID NO: 2349 - DNA, 17 bp, Artificial Sequence
  Description of Artificial Sequence: Synthetic oligonucleotide
gaattcactttgaattt

SEQ ID NO: 2350 - DNA, 17 bp, Artificial Sequence
  Description of Artificial Sequence: Synthetic oligonucleotide
tgaattcactttgaatt

SEQ ID NO: 2351 - DNA, 17 bp, Artificial Sequence
  Description of Artificial Sequence: Synthetic oligonucleotide
ttgaattcactttgaat

SEQ ID NO: 2352 - DNA, 17 bp, Artificial Sequence
  Description of Artificial Sequence: Synthetic oligonucleotide
gttgaattcactttgaa

SEQ ID NO: 2353 - DNA, 17 bp, Artificial Sequence
  Description of Artificial Sequence: Synthetic oligonucleotide
tgttgaattcactttga

SEQ ID NO: 2354 - DNA, 17 bp, Artificial Sequence
  Description of Artificial Sequence: Synthetic oligonucleotide
gcattgacaacactcaa

SEQ ID NO: 2355 - DNA, 17 bp, Artificial Sequence
  Description of Artificial Sequence: Synthetic oligonucleotide
aacatgtctggacctat

SEQ ID NO: 2356 - DNA, 17 bp, Artificial Sequence
  Description of Artificial Sequence: Synthetic oligonucleotide
gaacatgtctggaccta

SEQ ID NO: 2357 - DNA, 17 bp, Artificial Sequence
  Description of Artificial Sequence: Synthetic oligonucleotide
ggaacatgtctggacct

SEQ ID NO: 2358 - DNA, 17 bp, Artificial Sequence
  Description of Artificial Sequence: Synthetic oligonucleotide
aggaacatgtctggacc

SEQ ID NO: 2359 - DNA, 17 bp, Artificial Sequence
  Description of Artificial Sequence: Synthetic oligonucleotide
atttcagcaggacaacg

SEQ ID NO: 2360 - DNA, 17 bp, Artificial Sequence
  Description of Artificial Sequence: Synthetic oligonucleotide
aatttcagcaggacaac

SEQ ID NO: 2361 - DNA, 17 bp, Artificial Sequence
  Description of Artificial Sequence: Synthetic oligonucleotide
caatttcagcaggacaa

SEQ ID NO: 2362 - DNA, 17 bp, Artificial Sequence
  Description of Artificial Sequence: Synthetic oligonucleotide
acaatttcagcaggaca

SEQ ID NO: 2363 - DNA, 17 bp, Artificial Sequence
  Description of Artificial Sequence: Synthetic oligonucleotide
gcagatgaaacatcatg

SEQ ID NO: 2364 - DNA, 17 bp, Artificial Sequence
  Description of Artificial Sequence: Synthetic oligonucleotide
tgcagatgaaacatcat

SEQ ID NO: 2365 - DNA, 17 bp, Artificial Sequence
  Description of Artificial Sequence: Synthetic oligonucleotide
ttgcagatgaaacatca

SEQ ID NO: 2366 - DNA, 17 bp, Artificial Sequence
  Description of Artificial Sequence: Synthetic oligonucleotide
attgcagatgaaacatc

SEQ ID NO: 2367 - DNA, 17 bp, Artificial Sequence
  Description of Artificial Sequence: Synthetic oligonucleotide
gcttttctccaagcagg

SEQ ID NO: 2368 - DNA, 17 bp, Artificial Sequence
  Description of Artificial Sequence: Synthetic oligonucleotide
agcttttctccaagcag

SEQ ID NO: 2369 - DNA, 17 bp, Artificial Sequence
  Description of Artificial Sequence: Synthetic oligonucleotide
cagcttttctccaagca

SEQ ID NO: 2370 - DNA, 17 bp, Artificial Sequence
  Description of Artificial Sequence: Synthetic oligonucleotide
acagcttttctccaagc

SEQ ID NO: 2371 - DNA, 17 bp, Artificial Sequence
  Description of Artificial Sequence: Synthetic oligonucleotide
aatatgacatagtcata

SEQ ID NO: 2372 - DNA, 17 bp, Artificial Sequence
  Description of Artificial Sequence: Synthetic oligonucleotide
gaatatgacatagtcat

SEQ ID NO: 2373 - DNA, 17 bp, Artificial Sequence
  Description of Artificial Sequence: Synthetic oligonucleotide
tgaatatgacatagtca

SEQ ID NO: 2374 - DNA, 17 bp, Artificial Sequence
  Description of Artificial Sequence: Synthetic oligonucleotide
gtgaatatgacatagtc

SEQ ID NO: 2375 - DNA, 17 bp, Artificial Sequence
  Description of Artificial Sequence: Synthetic oligonucleotide
ctatcagacattatgca

SEQ ID NO: 2376 - DNA, 17 bp, Artificial Sequence
  Description of Artificial Sequence: Synthetic oligonucleotide
tctatcagacattatgc

SEQ ID NO: 2377 - DNA, 17 bp, Artificial Sequence
  Description of Artificial Sequence: Synthetic oligonucleotide
ctctatcagacattatg

SEQ ID NO: 2378 - DNA, 17 bp, Artificial Sequence
  Description of Artificial Sequence: Synthetic oligonucleotide
tctctatcagacattat

SEQ ID NO: 2379 - DNA, 17 bp, Artificial Sequence
  Description of Artificial Sequence: Synthetic oligonucleotide
tgtgtaggtgcctgtgt

SEQ ID NO: 2380 - DNA, 17 bp, Artificial Sequence
  Description of Artificial Sequence: Synthetic oligonucleotide
gtgtgtaggtgcctgtg

SEQ ID NO: 2381 - DNA, 17 bp, Artificial Sequence
  Description of Artificial Sequence: Synthetic oligonucleotide
ggtgtgtaggtgcctgt

SEQ ID NO: 2382 - DNA, 17 bp, Artificial Sequence
  Description of Artificial Sequence: Synthetic oligonucleotide
aggtgtgtaggtgcctg

SEQ ID NO: 2383 - DNA, 17 bp, Artificial Sequence
  Description of Artificial Sequence: Synthetic oligonucleotide
gaggtgtgtaggtgcct

SEQ ID NO: 2384 - DNA, 17 bp, Artificial Sequence
  Description of Artificial Sequence: Synthetic oligonucleotide
tgaggtgtgtaggtgcc

SEQ ID NO: 2385 - DNA, 17 bp, Artificial Sequence
  Description of Artificial Sequence: Synthetic oligonucleotide
ctgaggtgtgtaggtgc

SEQ ID NO: 2386 - DNA, 17 bp, Artificial Sequence
  Description of Artificial Sequence: Synthetic oligonucleotide
atcatagagatgagtct

SEQ ID NO: 2387 - DNA, 17 bp, Artificial Sequence
  Description of Artificial Sequence: Synthetic oligonucleotide
catcatagagatgagtc

SEQ ID NO: 2388 - DNA, 17 bp, Artificial Sequence
  Description of Artificial Sequence: Synthetic oligonucleotide
ccatcatagagatgagt

SEQ ID NO: 2389 - DNA, 17 bp, Artificial Sequence
  Description of Artificial Sequence: Synthetic oligonucleotide
cccatcatagagatgag

SEQ ID NO: 2390 - DNA, 17 bp, Artificial Sequence
  Description of Artificial Sequence: Synthetic oligonucleotide
acccatcatagagatga

SEQ ID NO: 2391 - DNA, 17 bp, Artificial Sequence
  Description of Artificial Sequence: Synthetic oligonucleotide
aacccatcatagagatg

SEQ ID NO: 2392 - DNA, 17 bp, Artificial Sequence
  Description of Artificial Sequence: Synthetic oligonucleotide
aaacccatcatagagat

SEQ ID NO: 2393 - DNA, 17 bp, Artificial Sequence
  Description of Artificial Sequence: Synthetic oligonucleotide
cgcttaacaaagcactc

SEQ ID NO: 2394 - DNA, 17 bp, Artificial Sequence
  Description of Artificial Sequence: Synthetic oligonucleotide
acattttctaaactctg

SEQ ID NO: 2395 - DNA, 17 bp, Artificial Sequence
  Description of Artificial Sequence: Synthetic oligonucleotide
cacattttctaaactct

SEQ ID NO: 2396 - DNA, 17 bp, Artificial Sequence
  Description of Artificial Sequence: Synthetic oligonucleotide
ccacattttctaaactc

SEQ ID NO: 2397 - DNA, 17 bp, Artificial Sequence
  Description of Artificial Sequence: Synthetic oligonucleotide
gccacattttctaaact

SEQ ID NO: 2398 - DNA, 17 bp, Artificial Sequence
  Description of Artificial Sequence: Synthetic oligonucleotide
agccacattttctaaac

SEQ ID NO: 2399 - DNA, 17 bp, Artificial Sequence
  Description of Artificial Sequence: Synthetic oligonucleotide
aagccacattttctaaa

SEQ ID NO: 2400 - DNA, 17 bp, Artificial Sequence
  Description of Artificial Sequence: Synthetic oligonucleotide
tgtccatcaaagtgtcc

SEQ ID NO: 2401 - DNA, 17 bp, Artificial Sequence
  Description of Artificial Sequence: Synthetic oligonucleotide
ttagcccaaagctcaaa

SEQ ID NO: 2402 - DNA, 17 bp, Artificial Sequence
  Description of Artificial Sequence: Synthetic oligonucleotide
cttagcccaaagctcaa

SEQ ID NO: 2403 - DNA, 17 bp, Artificial Sequence
  Description of Artificial Sequence: Synthetic oligonucleotide
gcttagcccaaagctca

SEQ ID NO: 2404 - DNA, 17 bp, Artificial Sequence
  Description of Artificial Sequence: Synthetic oligonucleotide
cgcttagcccaaagctc

SEQ ID NO: 2405 - DNA, 17 bp, Artificial Sequence
  Description of Artificial Sequence: Synthetic oligonucleotide
cccaaattattgagtat

SEQ ID NO: 2406 - DNA, 17 bp, Artificial Sequence
  Description of Artificial Sequence: Synthetic oligonucleotide
acccaaattattgagta

SEQ ID NO: 2407 - DNA, 17 bp, Artificial Sequence
  Description of Artificial Sequence: Synthetic oligonucleotide
cacccaaattattgagt

SEQ ID NO: 2408 - DNA, 17 bp, Artificial Sequence
  Description of Artificial Sequence: Synthetic oligonucleotide
acacccaaattattgag

SEQ ID NO: 2409 - DNA, 17 bp, Artificial Sequence
  Description of Artificial Sequence: Synthetic oligonucleotide
attaatgtgactccatt

SEQ ID NO: 2410 - DNA, 17 bp, Artificial Sequence
  Description of Artificial Sequence: Synthetic oligonucleotide
aattaatgtgactccat

SEQ ID NO: 2411 - DNA, 17 bp, Artificial Sequence
  Description of Artificial Sequence: Synthetic oligonucleotide
caattaatgtgactcca

SEQ ID NO: 2412 - DNA, 17 bp, Artificial Sequence
  Description of Artificial Sequence: Synthetic oligonucleotide
ccaattaatgtgactcc

SEQ ID NO: 2413 - DNA, 17 bp, Artificial Sequence
  Description of Artificial Sequence: Synthetic oligonucleotide
tccaattaatgtgactc

SEQ ID NO: 2414 - DNA, 17 bp, Artificial Sequence
  Description of Artificial Sequence: Synthetic oligonucleotide
ctccaattaatgtgact

SEQ ID NO: 2415 - DNA, 17 bp, Artificial Sequence
  Description of Artificial Sequence: Synthetic oligonucleotide
tctccaattaatgtgac

SEQ ID NO: 2416 - DNA, 17 bp, Artificial Sequence
  Description of Artificial Sequence: Synthetic oligonucleotide
ttctccaattaatgtga

SEQ ID NO: 2417 - DNA, 17 bp, Artificial Sequence
  Description of Artificial Sequence: Synthetic oligonucleotide
gcgacattcatcattat

SEQ ID NO: 2418 - DNA, 17 bp, Artificial Sequence
  Description of Artificial Sequence: Synthetic oligonucleotide
tgcgacattcatcatta

SEQ ID NO: 2419 - DNA, 17 bp, Artificial Sequence
  Description of Artificial Sequence: Synthetic oligonucleotide
ttgcgacattcatcatt

SEQ ID NO: 2420 - DNA, 17 bp, Artificial Sequence
  Description of Artificial Sequence: Synthetic oligonucleotide
tttgcgacattcatcat

SEQ ID NO: 2421 - DNA, 17 bp, Artificial Sequence
  Description of Artificial Sequence: Synthetic oligonucleotide
tcagcattccaagaatg

SEQ ID NO: 2422 - DNA, 17 bp, Artificial Sequence
  Description of Artificial Sequence: Synthetic oligonucleotide
ccaattaaaaatgcttc

SEQ ID NO: 2423 - DNA, 17 bp, Artificial Sequence
  Description of Artificial Sequence: Synthetic oligonucleotide
ctgttgttttctctaat

SEQ ID NO: 2424 - DNA, 17 bp, Artificial Sequence
  Description of Artificial Sequence: Synthetic oligonucleotide
tctgttgttttctctaa

SEQ ID NO: 2425 - DNA, 17 bp, Artificial Sequence
  Description of Artificial Sequence: Synthetic oligonucleotide
ctctgttgttttctcta

SEQ ID NO: 2426 - DNA, 17 bp, Artificial Sequence
  Description of Artificial Sequence: Synthetic oligonucleotide
actctgttgttttctct

SEQ ID NO: 2427 - DNA, 17 bp, Artificial Sequence
  Description of Artificial Sequence: Synthetic oligonucleotide
aactctgttgttttctc

SEQ ID NO: 2428 - DNA, 17 bp, Artificial Sequence
  Description of Artificial Sequence: Synthetic oligonucleotide
caactctgttgttttct

SEQ ID NO: 2429 - DNA, 17 bp, Artificial Sequence
  Description of Artificial Sequence: Synthetic oligonucleotide
acaactctgttgttttc

SEQ ID NO: 2430 - DNA, 17 bp, Artificial Sequence
  Description of Artificial Sequence: Synthetic oligonucleotide
aatatttgtgaaaaatt

SEQ ID NO: 2431 - DNA, 17 bp, Artificial Sequence
  Description of Artificial Sequence: Synthetic oligonucleotide
gccatttgcatagcaaa

SEQ ID NO: 2432 - DNA, 17 bp, Artificial Sequence
  Description of Artificial Sequence: Synthetic oligonucleotide
ttctcatagagaacatt

SEQ ID NO: 2433 - DNA, 17 bp, Artificial Sequence
  Description of Artificial Sequence: Synthetic oligonucleotide
gttctcatagagaacat

SEQ ID NO: 2434 - DNA, 17 bp, Artificial Sequence
  Description of Artificial Sequence: Synthetic oligonucleotide
ggttctcatagagaaca

SEQ ID NO: 2435 - DNA, 17 bp, Artificial Sequence
  Description of Artificial Sequence: Synthetic oligonucleotide
tggttctcatagagaac

SEQ ID NO: 2436 - DNA, 17 bp, Artificial Sequence
  Description of Artificial Sequence: Synthetic oligonucleotide
ttggttctcatagagaa

SEQ ID NO: 2437 - DNA, 17 bp, Artificial Sequence
  Description of Artificial Sequence: Synthetic oligonucleotide
tttggttctcatagaga

SEQ ID NO: 2438 - DNA, 17 bp, Artificial Sequence
  Description of Artificial Sequence: Synthetic oligonucleotide
ttttggttctcatagag

SEQ ID NO: 2439 - DNA, 17 bp, Artificial Sequence
  Description of Artificial Sequence: Synthetic oligonucleotide
tttttggttctcataga

SEQ ID NO: 2440 - DNA, 17 bp, Artificial Sequence
  Description of Artificial Sequence: Synthetic oligonucleotide
ctaagttgtttaacaag

SEQ ID NO: 2441 - DNA, 17 bp, Artificial Sequence
  Description of Artificial Sequence: Synthetic oligonucleotide
gctaagttgtttaacaa

SEQ ID NO: 2442 - DNA, 17 bp, Artificial Sequence
  Description of Artificial Sequence: Synthetic oligonucleotide
agctaagttgtttaaca

SEQ ID NO: 2443 - DNA, 17 bp, Artificial Sequence
  Description of Artificial Sequence: Synthetic oligonucleotide
gagctaagttgtttaac

SEQ ID NO: 2444 - DNA, 17 bp, Artificial Sequence
  Description of Artificial Sequence: Synthetic oligonucleotide
gcaagattagcagaagc

SEQ ID NO: 2445 - DNA, 17 bp, Artificial Sequence
  Description of Artificial Sequence: Synthetic oligonucleotide
agcaagattagcagaag

SEQ ID NO: 2446 - DNA, 17 bp, Artificial Sequence
  Description of Artificial Sequence: Synthetic oligonucleotide
cagcaagattagcagaa

SEQ ID NO: 2447 - DNA, 17 bp, Artificial Sequence
  Description of Artificial Sequence: Synthetic oligonucleotide
gcagcaagattagcaga

SEQ ID NO: 2448 - DNA, 17 bp, Artificial Sequence
  Description of Artificial Sequence: Synthetic oligonucleotide
agcagcaagattagcag

SEQ ID NO: 2449 - DNA, 17 bp, Artificial Sequence
  Description of Artificial Sequence: Synthetic oligonucleotide
tagcagcaagattagca

SEQ ID NO: 2450 - DNA, 17 bp, Artificial Sequence
  Description of Artificial Sequence: Synthetic oligonucleotide
gtagcagcaagattagc

SEQ ID NO: 2451 - DNA, 17 bp, Artificial Sequence
  Description of Artificial Sequence: Synthetic oligonucleotide
agtagcagcaagattag

SEQ ID NO: 2452 - DNA, 17 bp, Artificial Sequence
  Description of Artificial Sequence: Synthetic oligonucleotide
tagtagcagcaagatta

SEQ ID NO: 2453 - DNA, 17 bp, Artificial Sequence
  Description of Artificial Sequence: Synthetic oligonucleotide
ttagtagcagcaagatt

SEQ ID NO: 2454 - DNA, 17 bp, Artificial Sequence
  Description of Artificial Sequence: Synthetic oligonucleotide
tttagtagcagcaagat

SEQ ID NO: 2455 - DNA, 17 bp, Artificial Sequence
  Description of Artificial Sequence: Synthetic oligonucleotide
ttttagtagcagcaaga

SEQ ID NO: 2456 - DNA, 17 bp, Artificial Sequence
  Description of Artificial Sequence: Synthetic oligonucleotide
attttagtagcagcaag

SEQ ID NO: 2457 - DNA, 17 bp, Artificial Sequence
  Description of Artificial Sequence: Synthetic oligonucleotide
cattttagtagcagcaa

SEQ ID NO: 2458 - DNA, 17 bp, Artificial Sequence
  Description of Artificial Sequence: Synthetic oligonucleotide
acattttagtagcagca

SEQ ID NO: 2459 - DNA, 17 bp, Artificial Sequence
  Description of Artificial Sequence: Synthetic oligonucleotide
gacattttagtagcagc

SEQ ID NO: 2460 - DNA, 17 bp, Artificial Sequence
  Description of Artificial Sequence: Synthetic oligonucleotide
ctttttgattgtccaag

SEQ ID NO: 2461 - DNA, 17 bp, Artificial Sequence
  Description of Artificial Sequence: Synthetic oligonucleotide
tctttttgattgtccaa

SEQ ID NO: 2462 - DNA, 17 bp, Artificial Sequence
  Description of Artificial Sequence: Synthetic oligonucleotide
ctctttttgattgtcca

SEQ ID NO: 2463 - DNA, 17 bp, Artificial Sequence
  Description of Artificial Sequence: Synthetic oligonucleotide
actctttttgattgtcc

SEQ ID NO: 2464 - DNA, 17 bp, Artificial Sequence
  Description of Artificial Sequence: Synthetic oligonucleotide
aactctttttgattgtc

SEQ ID NO: 2465 - DNA, 17 bp, Artificial Sequence
  Description of Artificial Sequence: Synthetic oligonucleotide
caactctttttgattgt

SEQ ID NO: 2466 - DNA, 17 bp, Artificial Sequence
  Description of Artificial Sequence: Synthetic oligonucleotide
tcaactctttttgattg

SEQ ID NO: 2467 - DNA, 17 bp, Artificial Sequence
  Description of Artificial Sequence: Synthetic oligonucleotide
tctggtgatgtatgatt

SEQ ID NO: 2468 - DNA, 17 bp, Artificial Sequence
  Description of Artificial Sequence: Synthetic oligonucleotide
atctggtgatgtatgat

SEQ ID NO: 2469 - DNA, 17 bp, Artificial Sequence
  Description of Artificial Sequence: Synthetic oligonucleotide
catctggtgatgtatga

SEQ ID NO: 2470 - DNA, 17 bp, Artificial Sequence
  Description of Artificial Sequence: Synthetic oligonucleotide
acatctggtgatgtatg

SEQ ID NO: 2471 - DNA, 17 bp, Artificial Sequence
  Description of Artificial Sequence: Synthetic oligonucleotide
aacatctggtgatgtat

SEQ ID NO: 2472 - DNA, 17 bp, Artificial Sequence
  Description of Artificial Sequence: Synthetic oligonucleotide
caacatctggtgatgta

SEQ ID NO: 2473 - DNA, 17 bp, Artificial Sequence
  Description of Artificial Sequence: Synthetic oligonucleotide
tcaacatctggtgatgt

SEQ ID NO: 2474 - DNA, 17 bp, Artificial Sequence
  Description of Artificial Sequence: Synthetic oligonucleotide
atcaacatctggtgatg

SEQ ID NO: 2475 - DNA, 17 bp, Artificial Sequence
  Description of Artificial Sequence: Synthetic oligonucleotide
gaggcggtcaatttctt

SEQ ID NO: 2476 - DNA, 17 bp, Artificial Sequence
  Description of Artificial Sequence: Synthetic oligonucleotide
tgaggcggtcaatttct

SEQ ID NO: 2477 - DNA, 17 bp, Artificial Sequence
  Description of Artificial Sequence: Synthetic oligonucleotide
ttgaggcggtcaatttc

SEQ ID NO: 2478 - DNA, 17 bp, Artificial Sequence
  Description of Artificial Sequence: Synthetic oligonucleotide
attgaggcggtcaattt

SEQ ID NO: 2479 - DNA, 17 bp, Artificial Sequence
  Description of Artificial Sequence: Synthetic oligonucleotide
cattgaggcggtcaatt

SEQ ID NO: 2480 - DNA, 17 bp, Artificial Sequence
  Description of Artificial Sequence: Synthetic oligonucleotide
tcattgaggcggtcaat

SEQ ID NO: 2481 - DNA, 17 bp, Artificial Sequence
  Description of Artificial Sequence: Synthetic oligonucleotide
ctcattgaggcggtcaa

SEQ ID NO: 2482 - DNA, 17 bp, Artificial Sequence
  Description of Artificial Sequence: Synthetic oligonucleotide
cctcattgaggcggtca

SEQ ID NO: 2483 - DNA, 17 bp, Artificial Sequence
  Description of Artificial Sequence: Synthetic oligonucleotide
acctcattgaggcggtc

SEQ ID NO: 2484 - DNA, 17 bp, Artificial Sequence
  Description of Artificial Sequence: Synthetic oligonucleotide
gtgtaatgtaatttgac

SEQ ID NO: 2485 - DNA, 17 bp, Artificial Sequence
  Description of Artificial Sequence: Synthetic oligonucleotide
tgtgtaatgtaatttga

SEQ ID NO: 2486 - DNA, 17 bp, Artificial Sequence
  Description of Artificial Sequence: Synthetic oligonucleotide
atgtgtaatgtaatttg

SEQ ID NO: 2487 - DNA, 17 bp, Artificial Sequence
  Description of Artificial Sequence: Synthetic oligonucleotide
tatgtgtaatgtaattt

SEQ ID NO: 2488 - DNA, 17 bp, Artificial Sequence
  Description of Artificial Sequence: Synthetic oligonucleotide
ttatgtgtaatgtaatt

SEQ ID NO: 2489 - DNA, 17 bp, Artificial Sequence
  Description of Artificial Sequence: Synthetic oligonucleotide
tttatgtgtaatgtaat

SEQ ID NO: 2490 - DNA, 17 bp, Artificial Sequence
  Description of Artificial Sequence: Synthetic oligonucleotide
gtttatgtgtaatgtaa

SEQ ID NO: 2491 - DNA, 17 bp, Artificial Sequence
  Description of Artificial Sequence: Synthetic oligonucleotide
cgtttatgtgtaatgta

SEQ ID NO: 2492 - DNA, 17 bp, Artificial Sequence
  Description of Artificial Sequence: Synthetic oligonucleotide
agggagtgaggcttgta

SEQ ID NO: 2493 - DNA, 17 bp, Artificial Sequence
  Description of Artificial Sequence: Synthetic oligonucleotide
aagggagtgaggcttgt

SEQ ID NO: 2494 - DNA, 17 bp, Artificial Sequence
  Description of Artificial Sequence: Synthetic oligonucleotide
aaagggagtgaggcttg

SEQ ID NO: 2495 - DNA, 17 bp, Artificial Sequence
  Description of Artificial Sequence: Synthetic oligonucleotide
gaaagggagtgaggctt

SEQ ID NO: 2496 - DNA, 17 bp, Artificial Sequence
  Description of Artificial Sequence: Synthetic oligonucleotide
cgaaagggagtgaggct

SEQ ID NO: 2497 - DNA, 17 bp, Artificial Sequence
  Description of Artificial Sequence: Synthetic oligonucleotide
ccgaaagggagtgaggc

SEQ ID NO: 2498 - DNA, 17 bp, Artificial Sequence
  Description of Artificial Sequence: Synthetic oligonucleotide
tccgaaagggagtgagg

SEQ ID NO: 2499 - DNA, 17 bp, Artificial Sequence
  Description of Artificial Sequence: Synthetic oligonucleotide
atccgaaagggagtgag

SEQ ID NO: 2500 - DNA, 17 bp, Artificial Sequence
  Description of Artificial Sequence: Synthetic oligonucleotide
catccgaaagggagtga

SEQ ID NO: 2501 - DNA, 17 bp, Artificial Sequence
  Description of Artificial Sequence: Synthetic oligonucleotide
ccatccgaaagggagtg

SEQ ID NO: 2502 - DNA, 17 bp, Artificial Sequence
  Description of Artificial Sequence: Synthetic oligonucleotide
gccatccgaaagggagt

SEQ ID NO: 2503 - DNA, 17 bp, Artificial Sequence
  Description of Artificial Sequence: Synthetic oligonucleotide
agccatccgaaagggag

SEQ ID NO: 2504 - DNA, 17 bp, Artificial Sequence
  Description of Artificial Sequence: Synthetic oligonucleotide
aagccatccgaaaggga

SEQ ID NO: 2505 - DNA, 17 bp, Artificial Sequence
  Description of Artificial Sequence: Synthetic oligonucleotide
ctagtagtcgtcgtcgg

SEQ ID NO: 2506 - DNA, 17 bp, Artificial Sequence
  Description of Artificial Sequence: Synthetic oligonucleotide
gctagtagtcgtcgtcg

SEQ ID NO: 2507 - DNA, 17 bp, Artificial Sequence
  Description of Artificial Sequence: Synthetic oligonucleotide
cgctagtagtcgtcgtc

SEQ ID NO: 2508 - DNA, 17 bp, Artificial Sequence
  Description of Artificial Sequence: Synthetic oligonucleotide
acgctagtagtcgtcgt

SEQ ID NO: 2509 - DNA, 17 bp, Artificial Sequence
  Description of Artificial Sequence: Synthetic oligonucleotide
cacgctagtagtcgtcg

SEQ ID NO: 2510 - DNA, 17 bp, Artificial Sequence
  Description of Artificial Sequence: Synthetic oligonucleotide
gcacgctagtagtcgtc

SEQ ID NO: 2511 - DNA, 17 bp, Artificial Sequence
  Description of Artificial Sequence: Synthetic oligonucleotide
ggcacgctagtagtcgt

SEQ ID NO: 2512 - DNA, 17 bp, Artificial Sequence
  Description of Artificial Sequence: Synthetic oligonucleotide
aggcacgctagtagtcg

SEQ ID NO: 2513 - DNA, 17 bp, Artificial Sequence
  Description of Artificial Sequence: Synthetic oligonucleotide
aaggcacgctagtagtc

SEQ ID NO: 2514 - DNA, 17 bp, Artificial Sequence
  Description of Artificial Sequence: Synthetic oligonucleotide
aaaggcacgctagtagt

SEQ ID NO: 2515 - DNA, 17 bp, Artificial Sequence
  Description of Artificial Sequence: Synthetic oligonucleotide
caaaggcacgctagtag

SEQ ID NO: 2516 - DNA, 17 bp, Artificial Sequence
  Description of Artificial Sequence: Synthetic oligonucleotide
acaaaggcacgctagta

SEQ ID NO: 2517 - DNA, 17 bp, Artificial Sequence
  Description of Artificial Sequence: Synthetic oligonucleotide
tacaaaggcacgctagt

SEQ ID NO: 2518 - DNA, 17 bp, Artificial Sequence
  Description of Artificial Sequence: Synthetic oligonucleotide
ttacaaaggcacgctag

SEQ ID NO: 2519 - DNA, 17 bp, Artificial Sequence
  Description of Artificial Sequence: Synthetic oligonucleotide
cttacaaaggcacgcta

SEQ ID NO: 2520 - DNA, 17 bp, Artificial Sequence
  Description of Artificial Sequence: Synthetic oligonucleotide
gcttacaaaggcacgct

SEQ ID NO: 2521 - DNA, 17 bp, Artificial Sequence
  Description of Artificial Sequence: Synthetic oligonucleotide
tgcttacaaaggcacgc

SEQ ID NO: 2522 - DNA, 17 bp, Artificial Sequence
  Description of Artificial Sequence: Synthetic oligonucleotide
gtgcttacaaaggcacg

SEQ ID NO: 2523 - DNA, 17 bp, Artificial Sequence
  Description of Artificial Sequence: Synthetic oligonucleotide
tgtgcttacaaaggcac

SEQ ID NO: 2524 - DNA, 17 bp, Artificial Sequence
  Description of Artificial Sequence: Synthetic oligonucleotide
ttgtgcttacaaaggca

SEQ ID NO: 2525 - DNA, 17 bp, Artificial Sequence
  Description of Artificial Sequence: Synthetic oligonucleotide
cttgtgcttacaaaggc

SEQ ID NO: 2526 - DNA, 17 bp, Artificial Sequence
  Description of Artificial Sequence: Synthetic oligonucleotide
acataagttcgtactca

SEQ ID NO: 2527 - DNA, 17 bp, Artificial Sequence
  Description of Artificial Sequence: Synthetic oligonucleotide
tacataagttcgtactc

SEQ ID NO: 2528 - DNA, 17 bp, Artificial Sequence
  Description of Artificial Sequence: Synthetic oligonucleotide
gtacataagttcgtact

SEQ ID NO: 2529 - DNA, 17 bp, Artificial Sequence
  Description of Artificial Sequence: Synthetic oligonucleotide
agtacataagttcgtac

SEQ ID NO: 2530 - DNA, 17 bp, Artificial Sequence
  Description of Artificial Sequence: Synthetic oligonucleotide
gagtacataagttcgta

SEQ ID NO: 2531 - DNA, 17 bp, Artificial Sequence
  Description of Artificial Sequence: Synthetic oligonucleotide
tgagtacataagttcgt

SEQ ID NO: 2532 - DNA, 17 bp, Artificial Sequence
  Description of Artificial Sequence: Synthetic oligonucleotide
atgagtacataagttcg

SEQ ID NO: 2533 - DNA, 17 bp, Artificial Sequence
  Description of Artificial Sequence: Synthetic oligonucleotide
aatgagtacataagttc

SEQ ID NO: 2534 - DNA, 17 bp, Artificial Sequence
  Description of Artificial Sequence: Synthetic oligonucleotide
gaatgagtacataagtt

SEQ ID NO: 2535 - DNA, 17 bp, Artificial Sequence
  Description of Artificial Sequence: Synthetic oligonucleotide
cgaatgagtacataagt

SEQ ID NO: 2536 - DNA, 17 bp, Artificial Sequence
  Description of Artificial Sequence: Synthetic oligonucleotide
acgaatgagtacataag

SEQ ID NO: 2537 - DNA, 17 bp, Artificial Sequence
  Description of Artificial Sequence: Synthetic oligonucleotide
aacgaatgagtacataa

SEQ ID NO: 2538 - DNA, 17 bp, Artificial Sequence
  Description of Artificial Sequence: Synthetic oligonucleotide
aaacgaatgagtacata

SEQ ID NO: 2539 - DNA, 17 bp, Artificial Sequence
  Description of Artificial Sequence: Synthetic oligonucleotide
gaaacgaatgagtacat

SEQ ID NO: 2540 - DNA, 17 bp, Artificial Sequence
  Description of Artificial Sequence: Synthetic oligonucleotide
cgaaacgaatgagtaca

SEQ ID NO: 2541 - DNA, 17 bp, Artificial Sequence
  Description of Artificial Sequence: Synthetic oligonucleotide
ccgaaacgaatgagtac

SEQ ID NO: 2542 - DNA, 17 bp, Artificial Sequence
  Description of Artificial Sequence: Synthetic oligonucleotide
tccgaaacgaatgagta

SEQ ID NO: 2543 - DNA, 17 bp, Artificial Sequence
  Description of Artificial Sequence: Synthetic oligonucleotide
ttccgaaacgaatgagt

SEQ ID NO: 2544 - DNA, 17 bp, Artificial Sequence
  Description of Artificial Sequence: Synthetic oligonucleotide
cttccgaaacgaatgag

SEQ ID NO: 2545 - DNA, 17 bp, Artificial Sequence
  Description of Artificial Sequence: Synthetic oligonucleotide
tcttccgaaacgaatga

SEQ ID NO: 2546 - DNA, 17 bp, Artificial Sequence
  Description of Artificial Sequence: Synthetic oligonucleotide
actattaacgtacctgt

SEQ ID NO: 2547 - DNA, 17 bp, Artificial Sequence
  Description of Artificial Sequence: Synthetic oligonucleotide
aactattaacgtacctg

SEQ ID NO: 2548 - DNA, 17 bp, Artificial Sequence
  Description of Artificial Sequence: Synthetic oligonucleotide
taactattaacgtacct

SEQ ID NO: 2549 - DNA, 17 bp, Artificial Sequence
  Description of Artificial Sequence: Synthetic oligonucleotide
ttaactattaacgtacc

SEQ ID NO: 2550 - DNA, 17 bp, Artificial Sequence
  Description of Artificial Sequence: Synthetic oligonucleotide
attaactattaacgtac

SEQ ID NO: 2551 - DNA, 17 bp, Artificial Sequence
  Description of Artificial Sequence: Synthetic oligonucleotide
tattaactattaacgta

SEQ ID NO: 2552 - DNA, 17 bp, Artificial Sequence
  Description of Artificial Sequence: Synthetic oligonucleotide
ctattaactattaacgt

SEQ ID NO: 2553 - DNA, 17 bp, Artificial Sequence
  Description of Artificial Sequence: Synthetic oligonucleotide
gctattaactattaacg

SEQ ID NO: 2554 - DNA, 17 bp, Artificial Sequence
  Description of Artificial Sequence: Synthetic oligonucleotide
cgctattaactattaac

SEQ ID NO: 2555 - DNA, 17 bp, Artificial Sequence
  Description of Artificial Sequence: Synthetic oligonucleotide
acgctattaactattaa

SEQ ID NO: 2556 - DNA, 17 bp, Artificial Sequence
  Description of Artificial Sequence: Synthetic oligonucleotide
tacgctattaactatta

SEQ ID NO: 2557 - DNA, 17 bp, Artificial Sequence
  Description of Artificial Sequence: Synthetic oligonucleotide
gtacgctattaactatt

SEQ ID NO: 2558 - DNA, 17 bp, Artificial Sequence
  Description of Artificial Sequence: Synthetic oligonucleotide
agtacgctattaactat

SEQ ID NO: 2559 - DNA, 17 bp, Artificial Sequence
  Description of Artificial Sequence: Synthetic oligonucleotide
aagtacgctattaacta

SEQ ID NO: 2560 - DNA, 17 bp, Artificial Sequence
  Description of Artificial Sequence: Synthetic oligonucleotide
gaagtacgctattaact

SEQ ID NO: 2561 - DNA, 17 bp, Artificial Sequence
  Description of Artificial Sequence: Synthetic oligonucleotide
agaagtacgctattaac

SEQ ID NO: 2562 - DNA, 17 bp, Artificial Sequence
  Description of Artificial Sequence: Synthetic oligonucleotide
aagaagtacgctattaa

SEQ ID NO: 2563 - DNA, 17 bp, Artificial Sequence
  Description of Artificial Sequence: Synthetic oligonucleotide
aaagaagtacgctatta

SEQ ID NO: 2564 - DNA, 17 bp, Artificial Sequence
  Description of Artificial Sequence: Synthetic oligonucleotide
aaaagaagtacgctatt

SEQ ID NO: 2565 - DNA, 17 bp, Artificial Sequence
  Description of Artificial Sequence: Synthetic oligonucleotide
aaaaagaagtacgctat

SEQ ID NO: 2566 - DNA, 17 bp, Artificial Sequence
  Description of Artificial Sequence: Synthetic oligonucleotide
gaaaaagaagtacgcta

SEQ ID NO: 2567 - DNA, 17 bp, Artificial Sequence
  Description of Artificial Sequence: Synthetic oligonucleotide
agaaaaagaagtacgct

SEQ ID NO: 2568 - DNA, 17 bp, Artificial Sequence
  Description of Artificial Sequence: Synthetic oligonucleotide
aagaaaaagaagtacgc

SEQ ID NO: 2569 - DNA, 17 bp, Artificial Sequence
  Description of Artificial Sequence: Synthetic oligonucleotide
caagaaaaagaagtacg

SEQ ID NO: 2570 - DNA, 17 bp, Artificial Sequence
  Description of Artificial Sequence: Synthetic oligonucleotide
gcaagaaaaagaagtac

SEQ ID NO: 2571 - DNA, 17 bp, Artificial Sequence
  Description of Artificial Sequence: Synthetic oligonucleotide
agcaagaaaaagaagta

SEQ ID NO: 2572 - DNA, 17 bp, Artificial Sequence
  Description of Artificial Sequence: Synthetic oligonucleotide
aagcaagaaaaagaagt

SEQ ID NO: 2573 - DNA, 17 bp, Artificial Sequence
  Description of Artificial Sequence: Synthetic oligonucleotide
aaagcaagaaaaagaag

SEQ ID NO: 2574 - DNA, 17 bp, Artificial Sequence
  Description of Artificial Sequence: Synthetic oligonucleotide
gaaagcaagaaaaagaa

SEQ ID NO: 2575 - DNA, 17 bp, Artificial Sequence
  Description of Artificial Sequence: Synthetic oligonucleotide
cgaaagcaagaaaaaga

SEQ ID NO: 2576 - DNA, 17 bp, Artificial Sequence
  Description of Artificial Sequence: Synthetic oligonucleotide
acgaaagcaagaaaaag

SEQ ID NO: 2577 - DNA, 17 bp, Artificial Sequence
  Description of Artificial Sequence: Synthetic oligonucleotide
cacgaaagcaagaaaaa

SEQ ID NO: 2578 - DNA, 17 bp, Artificial Sequence
  Description of Artificial Sequence: Synthetic oligonucleotide
ccacgaaagcaagaaaa

SEQ ID NO: 2579 - DNA, 17 bp, Artificial Sequence
  Description of Artificial Sequence: Synthetic oligonucleotide
accacgaaagcaagaaa

SEQ ID NO: 2580 - DNA, 17 bp, Artificial Sequence
  Description of Artificial Sequence: Synthetic oligonucleotide
taccacgaaagcaagaa

SEQ ID NO: 2581 - DNA, 17 bp, Artificial Sequence
  Description of Artificial Sequence: Synthetic oligonucleotide
ataccacgaaagcaaga

SEQ ID NO: 2582 - DNA, 17 bp, Artificial Sequence
  Description of Artificial Sequence: Synthetic oligonucleotide
aataccacgaaagcaag

SEQ ID NO: 2583 - DNA, 17 bp, Artificial Sequence
  Description of Artificial Sequence: Synthetic oligonucleotide
gaataccacgaaagcaa

SEQ ID NO: 2584 - DNA, 17 bp, Artificial Sequence
  Description of Artificial Sequence: Synthetic oligonucleotide
agaataccacgaaagca

SEQ ID NO: 2585 - DNA, 17 bp, Artificial Sequence
  Description of Artificial Sequence: Synthetic oligonucleotide
aagaataccacgaaagc

SEQ ID NO: 2586 - DNA, 17 bp, Artificial Sequence
  Description of Artificial Sequence: Synthetic oligonucleotide
caagaataccacgaaag

SEQ ID NO: 2587 - DNA, 17 bp, Artificial Sequence
  Description of Artificial Sequence: Synthetic oligonucleotide
gcaagaataccacgaaa

SEQ ID NO: 2588 - DNA, 17 bp, Artificial Sequence
  Description of Artificial Sequence: Synthetic oligonucleotide
agcaagaataccacgaa

SEQ ID NO: 2589 - DNA, 17 bp, Artificial Sequence
  Description of Artificial Sequence: Synthetic oligonucleotide
tagcaagaataccacga

SEQ ID NO: 2590 - DNA, 17 bp, Artificial Sequence
  Description of Artificial Sequence: Synthetic oligonucleotide
ctagcaagaataccacg

SEQ ID NO: 2591 - DNA, 17 bp, Artificial Sequence
  Description of Artificial Sequence: Synthetic oligonucleotide
actagcaagaataccac

SEQ ID NO: 2592 - DNA, 17 bp, Artificial Sequence
  Description of Artificial Sequence: Synthetic oligonucleotide
gtaaggatggctagtgt

SEQ ID NO: 2593 - DNA, 17 bp, Artificial Sequence
  Description of Artificial Sequence: Synthetic oligonucleotide
agtaaggatggctagtg

SEQ ID NO: 2594 - DNA, 17 bp, Artificial Sequence
  Description of Artificial Sequence: Synthetic oligonucleotide
cagtaaggatggctagt

SEQ ID NO: 2595 - DNA, 17 bp, Artificial Sequence
  Description of Artificial Sequence: Synthetic oligonucleotide
gcagtaaggatggctag

SEQ ID NO: 2596 - DNA, 17 bp, Artificial Sequence
  Description of Artificial Sequence: Synthetic oligonucleotide
cgcagtaaggatggcta

SEQ ID NO: 2597 - DNA, 17 bp, Artificial Sequence
  Description of Artificial Sequence: Synthetic oligonucleotide
gcgcagtaaggatggct

SEQ ID NO: 2598 - DNA, 17 bp, Artificial Sequence
  Description of Artificial Sequence: Synthetic oligonucleotide
agcgcagtaaggatggc

SEQ ID NO: 2599 - DNA, 17 bp, Artificial Sequence
  Description of Artificial Sequence: Synthetic oligonucleotide
aagcgcagtaaggatgg

SEQ ID NO: 2600 - DNA, 17 bp, Artificial Sequence
  Description of Artificial Sequence: Synthetic oligonucleotide
gaagcgcagtaaggatg

SEQ ID NO: 2601 - DNA, 17 bp, Artificial Sequence
  Description of Artificial Sequence: Synthetic oligonucleotide
cgaagcgcagtaaggat

SEQ ID NO: 2602 - DNA, 17 bp, Artificial Sequence
  Description of Artificial Sequence: Synthetic oligonucleotide
tcgaagcgcagtaagga

SEQ ID NO: 2603 - DNA, 17 bp, Artificial Sequence
  Description of Artificial Sequence: Synthetic oligonucleotide
atcgaagcgcagtaagg

SEQ ID NO: 2604 - DNA, 17 bp, Artificial Sequence
  Description of Artificial Sequence: Synthetic oligonucleotide
aatcgaagcgcagtaag

SEQ ID NO: 2605 - DNA, 17 bp, Artificial Sequence
  Description of Artificial Sequence: Synthetic oligonucleotide
caatcgaagcgcagtaa

SEQ ID NO: 2606 - DNA, 17 bp, Artificial Sequence
  Description of Artificial Sequence: Synthetic oligonucleotide
acaatcgaagcgcagta

SEQ ID NO: 2607 - DNA, 17 bp, Artificial Sequence
  Description of Artificial Sequence: Synthetic oligonucleotide
cacaatcgaagcgcagt

SEQ ID NO: 2608 - DNA, 17 bp, Artificial Sequence
  Description of Artificial Sequence: Synthetic oligonucleotide
acacaatcgaagcgcag

SEQ ID NO: 2609 - DNA, 17 bp, Artificial Sequence
  Description of Artificial Sequence: Synthetic oligonucleotide
cacacaatcgaagcgca

SEQ ID NO: 2610 - DNA, 17 bp, Artificial Sequence
  Description of Artificial Sequence: Synthetic oligonucleotide
gcacacaatcgaagcgc

SEQ ID NO: 2611 - DNA, 17 bp, Artificial Sequence
  Description of Artificial Sequence: Synthetic oligonucleotide
cgcacacaatcgaagcg

SEQ ID NO: 2612 - DNA, 17 bp, Artificial Sequence
  Description of Artificial Sequence: Synthetic oligonucleotide
acgcacacaatcgaagc

SEQ ID NO: 2613 - DNA, 17 bp, Artificial Sequence
  Description of Artificial Sequence: Synthetic oligonucleotide
tacgcacacaatcgaag

SEQ ID NO: 2614 - DNA, 17 bp, Artificial Sequence
  Description of Artificial Sequence: Synthetic oligonucleotide
gtacgcacacaatcgaa

SEQ ID NO: 2615 - DNA, 17 bp, Artificial Sequence
  Description of Artificial Sequence: Synthetic oligonucleotide
agtacgcacacaatcga

SEQ ID NO: 2616 - DNA, 17 bp, Artificial Sequence
  Description of Artificial Sequence: Synthetic oligonucleotide
cagtacgcacacaatcg

SEQ ID NO: 2617 - DNA, 17 bp, Artificial Sequence
  Description of Artificial Sequence: Synthetic oligonucleotide
gcagtacgcacacaatc

SEQ ID NO: 2618 - DNA, 17 bp, Artificial Sequence
  Description of Artificial Sequence: Synthetic oligonucleotide
agcagtacgcacacaat

SEQ ID NO: 2619 - DNA, 17 bp, Artificial Sequence
  Description of Artificial Sequence: Synthetic oligonucleotide
cagcagtacgcacacaa

SEQ ID NO: 2620 - DNA, 17 bp, Artificial Sequence
  Description of Artificial Sequence: Synthetic oligonucleotide
gcagcagtacgcacaca

SEQ ID NO: 2621 - DNA, 17 bp, Artificial Sequence
  Description of Artificial Sequence: Synthetic oligonucleotide
tgcagcagtacgcacac

SEQ ID NO: 2622 - DNA, 17 bp, Artificial Sequence
  Description of Artificial Sequence: Synthetic oligonucleotide
ttgcagcagtacgcaca

SEQ ID NO: 2623 - DNA, 17 bp, Artificial Sequence
  Description of Artificial Sequence: Synthetic oligonucleotide
attgcagcagtacgcac

SEQ ID NO: 2624 - DNA, 17 bp, Artificial Sequence
  Description of Artificial Sequence: Synthetic oligonucleotide
tattgcagcagtacgca

SEQ ID NO: 2625 - DNA, 17 bp, Artificial Sequence
  Description of Artificial Sequence: Synthetic oligonucleotide
atattgcagcagtacgc

SEQ ID NO: 2626 - DNA, 17 bp, Artificial Sequence
  Description of Artificial Sequence: Synthetic oligonucleotide
aatattgcagcagtacg

SEQ ID NO: 2627 - DNA, 17 bp, Artificial Sequence
  Description of Artificial Sequence: Synthetic oligonucleotide
caatattgcagcagtac

SEQ ID NO: 2628 - DNA, 17 bp, Artificial Sequence
  Description of Artificial Sequence: Synthetic oligonucleotide
acaatattgcagcagta

SEQ ID NO: 2629 - DNA, 17 bp, Artificial Sequence
  Description of Artificial Sequence: Synthetic oligonucleotide
aacaatattgcagcagt

SEQ ID NO: 2630 - DNA, 17 bp, Artificial Sequence
  Description of Artificial Sequence: Synthetic oligonucleotide
taacaatattgcagcag

SEQ ID NO: 2631 - DNA, 17 bp, Artificial Sequence
  Description of Artificial Sequence: Synthetic oligonucleotide
ttaacaatattgcagca

SEQ ID NO: 2632 - DNA, 17 bp, Artificial Sequence
  Description of Artificial Sequence: Synthetic oligonucleotide
gttaacaatattgcagc

SEQ ID NO: 2633 - DNA, 17 bp, Artificial Sequence
  Description of Artificial Sequence: Synthetic oligonucleotide
cgttaacaatattgcag

SEQ ID NO: 2634 - DNA, 17 bp, Artificial Sequence
  Description of Artificial Sequence: Synthetic oligonucleotide
acgttaacaatattgca

SEQ ID NO: 2635 - DNA, 17 bp, Artificial Sequence
  Description of Artificial Sequence: Synthetic oligonucleotide
cacgttaacaatattgc

SEQ ID NO: 2636 - DNA, 17 bp, Artificial Sequence
  Description of Artificial Sequence: Synthetic oligonucleotide
tcacgttaacaatattg

SEQ ID NO: 2637 - DNA, 17 bp, Artificial Sequence
  Description of Artificial Sequence: Synthetic oligonucleotide
ctcacgttaacaatatt

SEQ ID NO: 2638 - DNA, 17 bp, Artificial Sequence
  Description of Artificial Sequence: Synthetic oligonucleotide
actcacgttaacaatat

SEQ ID NO: 2639 - DNA, 17 bp, Artificial Sequence
  Description of Artificial Sequence: Synthetic oligonucleotide
ttcagatttttaacacg

SEQ ID NO: 2640 - DNA, 17 bp, Artificial Sequence
  Description of Artificial Sequence: Synthetic oligonucleotide
cagaagatcaggaactc

SEQ ID NO: 2641 - DNA, 17 bp, Artificial Sequence
  Description of Artificial Sequence: Synthetic oligonucleotide
ccagaagatcaggaact

SEQ ID NO: 2642 - DNA, 17 bp, Artificial Sequence
  Description of Artificial Sequence: Synthetic oligonucleotide
accagaagatcaggaac

SEQ ID NO: 2643 - DNA, 17 bp, Artificial Sequence
  Description of Artificial Sequence: Synthetic oligonucleotide
gaccagaagatcaggaa

SEQ ID NO: 2644 - DNA, 17 bp, Artificial Sequence
  Description of Artificial Sequence: Synthetic oligonucleotide
agaccagaagatcagga

SEQ ID NO: 2645 - DNA, 17 bp, Artificial Sequence
  Description of Artificial Sequence: Synthetic oligonucleotide
tagaccagaagatcagg

SEQ ID NO: 2646 - DNA, 17 bp, Artificial Sequence
  Description of Artificial Sequence: Synthetic oligonucleotide
ttagaccagaagatcag

SEQ ID NO: 2647 - DNA, 17 bp, Artificial Sequence
  Description of Artificial Sequence: Synthetic oligonucleotide
tttagaccagaagatca

SEQ ID NO: 2648 - DNA, 17 bp, Artificial Sequence
  Description of Artificial Sequence: Synthetic oligonucleotide
gtttagaccagaagatc

SEQ ID NO: 2649 - DNA, 17 bp, Artificial Sequence
  Description of Artificial Sequence: Synthetic oligonucleotide
cgtttagaccagaagat

SEQ ID NO: 2650 - DNA, 17 bp, Artificial Sequence
  Description of Artificial Sequence: Synthetic oligonucleotide
tcgtttagaccagaaga

SEQ ID NO: 2651 - DNA, 17 bp, Artificial Sequence
  Description of Artificial Sequence: Synthetic oligonucleotide
ttcgtttagaccagaag

SEQ ID NO: 2652 - DNA, 17 bp, Artificial Sequence
  Description of Artificial Sequence: Synthetic oligonucleotide
gttcgtttagaccagaa

SEQ ID NO: 2653 - DNA, 17 bp, Artificial Sequence
  Description of Artificial Sequence: Synthetic oligonucleotide
agttcgtttagaccaga

SEQ ID NO: 2654 - DNA, 17 bp, Artificial Sequence
  Description of Artificial Sequence: Synthetic oligonucleotide
tagttcgtttagaccag

SEQ ID NO: 2655 - DNA, 17 bp, Artificial Sequence
  Description of Artificial Sequence: Synthetic oligonucleotide
ttagttcgtttagacca

SEQ ID NO: 2656 - DNA, 17 bp, Artificial Sequence
  Description of Artificial Sequence: Synthetic oligonucleotide
taaagttccaaacagaa

SEQ ID NO: 2657 - DNA, 17 bp, Artificial Sequence
  Description of Artificial Sequence: Synthetic oligonucleotide
ttaaagttccaaacaga

SEQ ID NO: 2658 - DNA, 17 bp, Artificial Sequence
  Description of Artificial Sequence: Synthetic oligonucleotide
actaggttccattgttc

SEQ ID NO: 2659 - DNA, 17 bp, Artificial Sequence
  Description of Artificial Sequence: Synthetic oligonucleotide
tactaggttccattgtt

SEQ ID NO: 2660 - DNA, 17 bp, Artificial Sequence
  Description of Artificial Sequence: Synthetic oligonucleotide
ttactaggttccattgt

SEQ ID NO: 2661 - DNA, 17 bp, Artificial Sequence
  Description of Artificial Sequence: Synthetic oligonucleotide
attactaggttccattg

SEQ ID NO: 2662 - DNA, 17 bp, Artificial Sequence
  Description of Artificial Sequence: Synthetic oligonucleotide
tattactaggttccatt

SEQ ID NO: 2663 - DNA, 17 bp, Artificial Sequence
  Description of Artificial Sequence: Synthetic oligonucleotide
ctattactaggttccat

SEQ ID NO: 2664 - DNA, 17 bp, Artificial Sequence
  Description of Artificial Sequence: Synthetic oligonucleotide
cctattactaggttcca

SEQ ID NO: 2665 - DNA, 17 bp, Artificial Sequence
  Description of Artificial Sequence: Synthetic oligonucleotide
acctattactaggttcc

SEQ ID NO: 2666 - DNA, 17 bp, Artificial Sequence
  Description of Artificial Sequence: Synthetic oligonucleotide
aacctattactaggttc

SEQ ID NO: 2667 - DNA, 17 bp, Artificial Sequence
  Description of Artificial Sequence: Synthetic oligonucleotide
aaacctattactaggtt

SEQ ID NO: 2668 - DNA, 17 bp, Artificial Sequence
  Description of Artificial Sequence: Synthetic oligonucleotide
gaaacctattactaggt

SEQ ID NO: 2669 - DNA, 17 bp, Artificial Sequence
  Description of Artificial Sequence: Synthetic oligonucleotide
acagcagcaagcacaaa

SEQ ID NO: 2670 - DNA, 17 bp, Artificial Sequence
  Description of Artificial Sequence: Synthetic oligonucleotide
agccacatcaagcctac

SEQ ID NO: 2671 - DNA, 17 bp, Artificial Sequence
  Description of Artificial Sequence: Synthetic oligonucleotide
agcgttcgtgatgtagc

SEQ ID NO: 2672 - DNA, 17 bp, Artificial Sequence
  Description of Artificial Sequence: Synthetic oligonucleotide
aagcgttcgtgatgtag

SEQ ID NO: 2673 - DNA, 17 bp, Artificial Sequence
  Description of Artificial Sequence: Synthetic oligonucleotide
aaagcgttcgtgatgta

SEQ ID NO: 2674 - DNA, 17 bp, Artificial Sequence
  Description of Artificial Sequence: Synthetic oligonucleotide
gaaagcgttcgtgatgt

SEQ ID NO: 2675 - DNA, 17 bp, Artificial Sequence
  Description of Artificial Sequence: Synthetic oligonucleotide
agaaagcgttcgtgatg

SEQ ID NO: 2676 - DNA, 17 bp, Artificial Sequence
  Description of Artificial Sequence: Synthetic oligonucleotide
aagaaagcgttcgtgat

SEQ ID NO: 2677 - DNA, 17 bp, Artificial Sequence
  Description of Artificial Sequence: Synthetic oligonucleotide
taagaaagcgttcgtga

SEQ ID NO: 2678 - DNA, 17 bp, Artificial Sequence
  Description of Artificial Sequence: Synthetic oligonucleotide
ataagaaagcgttcgtg

SEQ ID NO: 2679 - DNA, 17 bp, Artificial Sequence
  Description of Artificial Sequence: Synthetic oligonucleotide
aataagaaagcgttcgt

SEQ ID NO: 2680 - DNA, 17 bp, Artificial Sequence
  Description of Artificial Sequence: Synthetic oligonucleotide
taataagaaagcgttcg

SEQ ID NO: 2681 - DNA, 17 bp, Artificial Sequence
  Description of Artificial Sequence: Synthetic oligonucleotide
gtaataagaaagcgttc

SEQ ID NO: 2682 - DNA, 17 bp, Artificial Sequence
  Description of Artificial Sequence: Synthetic oligonucleotide
tgtaataagaaagcgtt

SEQ ID NO: 2683 - DNA, 17 bp, Artificial Sequence
  Description of Artificial Sequence: Synthetic oligonucleotide
ttgtaataagaaagcgt

SEQ ID NO: 2684 - DNA, 17 bp, Artificial Sequence
  Description of Artificial Sequence: Synthetic oligonucleotide
tttgtaataagaaagcg

SEQ ID NO: 2685 - DNA, 17 bp, Artificial Sequence
  Description of Artificial Sequence: Synthetic oligonucleotide
atttgtaataagaaagc

SEQ ID NO: 2686 - DNA, 17 bp, Artificial Sequence
  Description of Artificial Sequence: Synthetic oligonucleotide
aatttgtaataagaaag

SEQ ID NO: 2687 - DNA, 17 bp, Artificial Sequence
  Description of Artificial Sequence: Synthetic oligonucleotide
tatgcagcaaaacctga

SEQ ID NO: 2688 - DNA, 17 bp, Artificial Sequence
  Description of Artificial Sequence: Synthetic oligonucleotide
gtatgcagcaaaacctg

SEQ ID NO: 2689 - DNA, 17 bp, Artificial Sequence
  Description of Artificial Sequence: Synthetic oligonucleotide
tgtatgcagcaaaacct

SEQ ID NO: 2690 - DNA, 17 bp, Artificial Sequence
  Description of Artificial Sequence: Synthetic oligonucleotide
agcaaagcaatattgtc

SEQ ID NO: 2691 - DNA, 17 bp, Artificial Sequence
  Description of Artificial Sequence: Synthetic oligonucleotide
gttgtcacttactgtac

SEQ ID NO: 2692 - DNA, 17 bp, Artificial Sequence
  Description of Artificial Sequence: Synthetic oligonucleotide
tgttgtcacttactgta

SEQ ID NO: 2693 - DNA, 17 bp, Artificial Sequence
  Description of Artificial Sequence: Synthetic oligonucleotide
ctgttgtcacttactgt

SEQ ID NO: 2694 - DNA, 17 bp, Artificial Sequence
  Description of Artificial Sequence: Synthetic oligonucleotide
tctgttgtcacttactg

SEQ ID NO: 2695 - DNA, 17 bp, Artificial Sequence
  Description of Artificial Sequence: Synthetic oligonucleotide
atctgttgtcacttact

SEQ ID NO: 2696 - DNA, 17 bp, Artificial Sequence
  Description of Artificial Sequence: Synthetic oligonucleotide
catctgttgtcacttac

SEQ ID NO: 2697 - DNA, 17 bp, Artificial Sequence
  Description of Artificial Sequence: Synthetic oligonucleotide
acatctgttgtcactta

SEQ ID NO: 2698 - DNA, 17 bp, Artificial Sequence
  Description of Artificial Sequence: Synthetic oligonucleotide
aacatctgttgtcactt

SEQ ID NO: 2699 - DNA, 17 bp, Artificial Sequence
  Description of Artificial Sequence: Synthetic oligonucleotide
aaacatctgttgtcact

SEQ ID NO: 2700 - DNA, 17 bp, Artificial Sequence
  Description of Artificial Sequence: Synthetic oligonucleotide
gaaacatctgttgtcac

SEQ ID NO: 2701 - DNA, 17 bp, Artificial Sequence
  Description of Artificial Sequence: Synthetic oligonucleotide
tgaaacatctgttgtca

SEQ ID NO: 2702 - DNA, 17 bp, Artificial Sequence
  Description of Artificial Sequence: Synthetic oligonucleotide
atgaaacatctgttgtc

SEQ ID NO: 2703 - DNA, 17 bp, Artificial Sequence
  Description of Artificial Sequence: Synthetic oligonucleotide
gatgaaacatctgttgt

SEQ ID NO: 2704 - DNA, 17 bp, Artificial Sequence
  Description of Artificial Sequence: Synthetic oligonucleotide
agatgaaacatctgttg

SEQ ID NO: 2705 - DNA, 17 bp, Artificial Sequence
  Description of Artificial Sequence: Synthetic oligonucleotide
ttcatgttcgtttaatc

SEQ ID NO: 2706 - DNA, 17 bp, Artificial Sequence
  Description of Artificial Sequence: Synthetic oligonucleotide
tttcatgttcgtttaat

SEQ ID NO: 2707 - DNA, 17 bp, Artificial Sequence
  Description of Artificial Sequence: Synthetic oligonucleotide
ttttcatgttcgtttaa

SEQ ID NO: 2708 - DNA, 17 bp, Artificial Sequence
  Description of Artificial Sequence: Synthetic oligonucleotide
attttcatgttcgttta

SEQ ID NO: 2709 - DNA, 17 bp, Artificial Sequence
  Description of Artificial Sequence: Synthetic oligonucleotide
aattttcatgttcgttt

SEQ ID NO: 2710 - DNA, 17 bp, Artificial Sequence
  Description of Artificial Sequence: Synthetic oligonucleotide
taattttcatgttcgtt

SEQ ID NO: 2711 - DNA, 17 bp, Artificial Sequence
  Description of Artificial Sequence: Synthetic oligonucleotide
ataattttcatgttcgt

SEQ ID NO: 2712 - DNA, 17 bp, Artificial Sequence
  Description of Artificial Sequence: Synthetic oligonucleotide
aataattttcatgttcg

SEQ ID NO: 2713 - DNA, 17 bp, Artificial Sequence
  Description of Artificial Sequence: Synthetic oligonucleotide
gaataattttcatgttc

SEQ ID NO: 2714 - DNA, 17 bp, Artificial Sequence
  Description of Artificial Sequence: Synthetic oligonucleotide
agaataattttcatgtt

SEQ ID NO: 2715 - DNA, 17 bp, Artificial Sequence
  Description of Artificial Sequence: Synthetic oligonucleotide
gtacctctaacacactc

SEQ ID NO: 2716 - DNA, 17 bp, Artificial Sequence
  Description of Artificial Sequence: Synthetic oligonucleotide
ggtgaattgccctcgta

SEQ ID NO: 2717 - DNA, 17 bp, Artificial Sequence
  Description of Artificial Sequence: Synthetic oligonucleotide
tggtgaattgccctcgt

SEQ ID NO: 2718 - DNA, 17 bp, Artificial Sequence
  Description of Artificial Sequence: Synthetic oligonucleotide
atggtgaattgccctcg

SEQ ID NO: 2719 - DNA, 17 bp, Artificial Sequence
  Description of Artificial Sequence: Synthetic oligonucleotide
aatggtgaattgccctc

SEQ ID NO: 2720 - DNA, 17 bp, Artificial Sequence
  Description of Artificial Sequence: Synthetic oligonucleotide
aaatggtgaattgccct

SEQ ID NO: 2721 - DNA, 17 bp, Artificial Sequence
  Description of Artificial Sequence: Synthetic oligonucleotide
gaaatggtgaattgccc

SEQ ID NO: 2722 - DNA, 17 bp, Artificial Sequence
  Description of Artificial Sequence: Synthetic oligonucleotide
tgaaatggtgaattgcc

SEQ ID NO: 2723 - DNA, 17 bp, Artificial Sequence
  Description of Artificial Sequence: Synthetic oligonucleotide
tcctcttgtctgatgaa

SEQ ID NO: 2724 - DNA, 17 bp, Artificial Sequence
  Description of Artificial Sequence: Synthetic oligonucleotide
aaatagaagtcaattaa

SEQ ID NO: 2725 - DNA, 17 bp, Artificial Sequence
  Description of Artificial Sequence: Synthetic oligonucleotide
caaatagaagtcaatta

SEQ ID NO: 2726 - DNA, 17 bp, Artificial Sequence
  Description of Artificial Sequence: Synthetic oligonucleotide
acaaatagaagtcaatt

SEQ ID NO: 2727 - DNA, 17 bp, Artificial Sequence
  Description of Artificial Sequence: Synthetic oligonucleotide
cacaaatagaagtcaat

SEQ ID NO: 2728 - DNA, 17 bp, Artificial Sequence
  Description of Artificial Sequence: Synthetic oligonucleotide
gcacaaatagaagtcaa

SEQ ID NO: 2729 - DNA, 17 bp, Artificial Sequence
  Description of Artificial Sequence: Synthetic oligonucleotide
agcacaaatagaagtca

SEQ ID NO: 2730 - DNA, 17 bp, Artificial Sequence
  Description of Artificial Sequence: Synthetic oligonucleotide
aagcacaaatagaagtc

SEQ ID NO: 2731 - DNA, 17 bp, Artificial Sequence
  Description of Artificial Sequence: Synthetic oligonucleotide
aaagcacaaatagaagt

SEQ ID NO: 2732 - DNA, 17 bp, Artificial Sequence
  Description of Artificial Sequence: Synthetic oligonucleotide
aaaagcacaaatagaag

SEQ ID NO: 2733 - DNA, 17 bp, Artificial Sequence
  Description of Artificial Sequence: Synthetic oligonucleotide
aaaaagcacaaatagaa

SEQ ID NO: 2734 - DNA, 17 bp, Artificial Sequence
  Description of Artificial Sequence: Synthetic oligonucleotide
taaaaagcacaaataga

SEQ ID NO: 2735 - DNA, 17 bp, Artificial Sequence
  Description of Artificial Sequence: Synthetic oligonucleotide
ctaaaaagcacaaatag

SEQ ID NO: 2736 - DNA, 17 bp, Artificial Sequence
  Description of Artificial Sequence: Synthetic oligonucleotide
gctaaaaagcacaaata

SEQ ID NO: 2737 - DNA, 17 bp, Artificial Sequence
  Description of Artificial Sequence: Synthetic oligonucleotide
ggctaaaaagcacaaat

SEQ ID NO: 2738 - DNA, 17 bp, Artificial Sequence
  Description of Artificial Sequence: Synthetic oligonucleotide
aggctaaaaagcacaaa

SEQ ID NO: 2739 - DNA, 17 bp, Artificial Sequence
  Description of Artificial Sequence: Synthetic oligonucleotide
aaggctaaaaagcacaa

SEQ ID NO: 2740 - DNA, 17 bp, Artificial Sequence
  Description of Artificial Sequence: Synthetic oligonucleotide
aaaggctaaaaagcaca

SEQ ID NO: 2741 - DNA, 17 bp, Artificial Sequence
  Description of Artificial Sequence: Synthetic oligonucleotide
gaaaggctaaaaagcac

SEQ ID NO: 2742 - DNA, 17 bp, Artificial Sequence
  Description of Artificial Sequence: Synthetic oligonucleotide
agaaaggctaaaaagca

SEQ ID NO: 2743 - DNA, 17 bp, Artificial Sequence
  Description of Artificial Sequence: Synthetic oligonucleotide
cagaaaggctaaaaagc

SEQ ID NO: 2744 - DNA, 17 bp, Artificial Sequence
  Description of Artificial Sequence: Synthetic oligonucleotide
gcagaaaggctaaaaag

SEQ ID NO: 2745 - DNA, 17 bp, Artificial Sequence
  Description of Artificial Sequence: Synthetic oligonucleotide
agcagaaaggctaaaaa

SEQ ID NO: 2746 - DNA, 17 bp, Artificial Sequence
  Description of Artificial Sequence: Synthetic oligonucleotide
tagcagaaaggctaaaa

SEQ ID NO: 2747 - DNA, 17 bp, Artificial Sequence
  Description of Artificial Sequence: Synthetic oligonucleotide
atagcagaaaggctaaa

SEQ ID NO: 2748 - DNA, 17 bp, Artificial Sequence
  Description of Artificial Sequence: Synthetic oligonucleotide
aatagcagaaaggctaa

SEQ ID NO: 2749 - DNA, 17 bp, Artificial Sequence
  Description of Artificial Sequence: Synthetic oligonucleotide
gaatagcagaaaggcta

SEQ ID NO: 2750 - DNA, 17 bp, Artificial Sequence
  Description of Artificial Sequence: Synthetic oligonucleotide
ggaatagcagaaaggct

SEQ ID NO: 2751 - DNA, 17 bp, Artificial Sequence
  Description of Artificial Sequence: Synthetic oligonucleotide
aggaatagcagaaaggc

SEQ ID NO: 2752 - DNA, 17 bp, Artificial Sequence
  Description of Artificial Sequence: Synthetic oligonucleotide
aaggaatagcagaaagg

SEQ ID NO: 2753 - DNA, 17 bp, Artificial Sequence
  Description of Artificial Sequence: Synthetic oligonucleotide
caaggaatagcagaaag

SEQ ID NO: 2754 - DNA, 17 bp, Artificial Sequence
  Description of Artificial Sequence: Synthetic oligonucleotide
acaaggaatagcagaaa

SEQ ID NO: 2755 - DNA, 17 bp, Artificial Sequence
  Description of Artificial Sequence: Synthetic oligonucleotide
aacaaggaatagcagaa

SEQ ID NO: 2756 - DNA, 17 bp, Artificial Sequence
  Description of Artificial Sequence: Synthetic oligonucleotide
cattatcagacatttta

SEQ ID NO: 2757 - DNA, 17 bp, Artificial Sequence
  Description of Artificial Sequence: Synthetic oligonucleotide
ccattatcagacatttt

SEQ ID NO: 2758 - DNA, 17 bp, Artificial Sequence
  Description of Artificial Sequence: Synthetic oligonucleotide
tccattatcagacattt

SEQ ID NO: 2759 - DNA, 17 bp, Artificial Sequence
  Description of Artificial Sequence: Synthetic oligonucleotide
gtccattatcagacatt

SEQ ID NO: 2760 - DNA, 17 bp, Artificial Sequence
  Description of Artificial Sequence: Synthetic oligonucleotide
ggtccattatcagacat

SEQ ID NO: 2761 - DNA, 17 bp, Artificial Sequence
  Description of Artificial Sequence: Synthetic oligonucleotide
gggtccattatcagaca

SEQ ID NO: 2762 - DNA, 17 bp, Artificial Sequence
  Description of Artificial Sequence: Synthetic oligonucleotide
ggggtccattatcagac

SEQ ID NO: 2763 - DNA, 17 bp, Artificial Sequence
  Description of Artificial Sequence: Synthetic oligonucleotide
tggggtccattatcaga

SEQ ID NO: 2764 - DNA, 17 bp, Artificial Sequence
  Description of Artificial Sequence: Synthetic oligonucleotide
ttggggtccattatcag

SEQ ID NO: 2765 - DNA, 17 bp, Artificial Sequence
  Description of Artificial Sequence: Synthetic oligonucleotide
tttggggtccattatca

SEQ ID NO: 2766 - DNA, 17 bp, Artificial Sequence
  Description of Artificial Sequence: Synthetic oligonucleotide
ttttggggtccattatc

SEQ ID NO: 2767 - DNA, 17 bp, Artificial Sequence
  Description of Artificial Sequence: Synthetic oligonucleotide
ttgggtaaaccttgggg

SEQ ID NO: 2768 - DNA, 17 bp, Artificial Sequence
  Description of Artificial Sequence: Synthetic oligonucleotide
attgggtaaaccttggg

SEQ ID NO: 2769 - DNA, 17 bp, Artificial Sequence
  Description of Artificial Sequence: Synthetic oligonucleotide
tattgggtaaaccttgg

SEQ ID NO: 2770 - DNA, 17 bp, Artificial Sequence
  Description of Artificial Sequence: Synthetic oligonucleotide
ttattgggtaaaccttg

SEQ ID NO: 2771 - DNA, 17 bp, Artificial Sequence
  Description of Artificial Sequence: Synthetic oligonucleotide
attattgggtaaacctt

SEQ ID NO: 2772 - DNA, 17 bp, Artificial Sequence
  Description of Artificial Sequence: Synthetic oligonucleotide
tattattgggtaaacct

SEQ ID NO: 2773 - DNA, 17 bp, Artificial Sequence
  Description of Artificial Sequence: Synthetic oligonucleotide
gtattattgggtaaacc

SEQ ID NO: 2774 - DNA, 17 bp, Artificial Sequence
  Description of Artificial Sequence: Synthetic oligonucleotide
agtattattgggtaaac

SEQ ID NO: 2775 - DNA, 17 bp, Artificial Sequence
  Description of Artificial Sequence: Synthetic oligonucleotide
cagtattattgggtaaa

SEQ ID NO: 2776 - DNA, 17 bp, Artificial Sequence
  Description of Artificial Sequence: Synthetic oligonucleotide
gcagtattattgggtaa

SEQ ID NO: 2777 - DNA, 17 bp, Artificial Sequence
  Description of Artificial Sequence: Synthetic oligonucleotide
cgcagtattattgggta

SEQ ID NO: 2778 - DNA, 17 bp, Artificial Sequence
  Description of Artificial Sequence: Synthetic oligonucleotide
acgcagtattattgggt

SEQ ID NO: 2779 - DNA, 17 bp, Artificial Sequence
  Description of Artificial Sequence: Synthetic oligonucleotide
gacgcagtattattggg

SEQ ID NO: 2780 - DNA, 17 bp, Artificial Sequence
  Description of Artificial Sequence: Synthetic oligonucleotide
agacgcagtattattgg

SEQ ID NO: 2781 - DNA, 17 bp, Artificial Sequence
  Description of Artificial Sequence: Synthetic oligonucleotide
aagacgcagtattattg

SEQ ID NO: 2782 - DNA, 17 bp, Artificial Sequence
  Description of Artificial Sequence: Synthetic oligonucleotide
caagacgcagtattatt

SEQ ID NO: 2783 - DNA, 17 bp, Artificial Sequence
  Description of Artificial Sequence: Synthetic oligonucleotide
ccaagacgcagtattat

SEQ ID NO: 2784 - DNA, 17 bp, Artificial Sequence
  Description of Artificial Sequence: Synthetic oligonucleotide
accaagacgcagtatta

SEQ ID NO: 2785 - DNA, 17 bp, Artificial Sequence
  Description of Artificial Sequence: Synthetic oligonucleotide
aaccaagacgcagtatt

SEQ ID NO: 2786 - DNA, 17 bp, Artificial Sequence
  Description of Artificial Sequence: Synthetic oligonucleotide
gaaccaagacgcagtat

SEQ ID NO: 2787 - DNA, 17 bp, Artificial Sequence
  Description of Artificial Sequence: Synthetic oligonucleotide
tgaaccaagacgcagta

SEQ ID NO: 2788 - DNA, 17 bp, Artificial Sequence
  Description of Artificial Sequence: Synthetic oligonucleotide
gtgaaccaagacgcagt

SEQ ID NO: 2789 - DNA, 17 bp, Artificial Sequence
  Description of Artificial Sequence: Synthetic oligonucleotide
agccaatttggtcatct

SEQ ID NO: 2790 - DNA, 17 bp, Artificial Sequence
  Description of Artificial Sequence: Synthetic oligonucleotide
tagccaatttggtcatc

SEQ ID NO: 2791 - DNA, 17 bp, Artificial Sequence
  Description of Artificial Sequence: Synthetic oligonucleotide
gtagccaatttggtcat

SEQ ID NO: 2792 - DNA, 17 bp, Artificial Sequence
  Description of Artificial Sequence: Synthetic oligonucleotide
agtagccaatttggtca

SEQ ID NO: 2793 - DNA, 17 bp, Artificial Sequence
  Description of Artificial Sequence: Synthetic oligonucleotide
tagtagccaatttggtc

SEQ ID NO: 2794 - DNA, 17 bp, Artificial Sequence
  Description of Artificial Sequence: Synthetic oligonucleotide
gtagtagccaatttggt

SEQ ID NO: 2795 - DNA, 17 bp, Artificial Sequence
  Description of Artificial Sequence: Synthetic oligonucleotide
ggtagtagccaatttgg

SEQ ID NO: 2796 - DNA, 17 bp, Artificial Sequence
  Description of Artificial Sequence: Synthetic oligonucleotide
cggtagtagccaatttg

SEQ ID NO: 2797 - DNA, 17 bp, Artificial Sequence
  Description of Artificial Sequence: Synthetic oligonucleotide
tcggtagtagccaattt

SEQ ID NO: 2798 - DNA, 17 bp, Artificial Sequence
  Description of Artificial Sequence: Synthetic oligonucleotide
ttcggtagtagccaatt

SEQ ID NO: 2799 - DNA, 17 bp, Artificial Sequence
  Description of Artificial Sequence: Synthetic oligonucleotide
cttcggtagtagccaat

SEQ ID NO: 2800 - DNA, 17 bp, Artificial Sequence
  Description of Artificial Sequence: Synthetic oligonucleotide
tcttcggtagtagccaa

SEQ ID NO: 2801 - DNA, 17 bp, Artificial Sequence
  Description of Artificial Sequence: Synthetic oligonucleotide
ctcttcggtagtagcca

SEQ ID NO: 2802 - DNA, 17 bp, Artificial Sequence
  Description of Artificial Sequence: Synthetic oligonucleotide
gctcttcggtagtagcc

SEQ ID NO: 2803 - DNA, 17 bp, Artificial Sequence
  Description of Artificial Sequence: Synthetic oligonucleotide
agctcttcggtagtagc

SEQ ID NO: 2804 - DNA, 17 bp, Artificial Sequence
  Description of Artificial Sequence: Synthetic oligonucleotide
tagctcttcggtagtag

SEQ ID NO: 2805 - DNA, 17 bp, Artificial Sequence
  Description of Artificial Sequence: Synthetic oligonucleotide
gtagctcttcggtagta

SEQ ID NO: 2806 - DNA, 17 bp, Artificial Sequence
  Description of Artificial Sequence: Synthetic oligonucleotide
ggtagctcttcggtagt

SEQ ID NO: 2807 - DNA, 17 bp, Artificial Sequence
  Description of Artificial Sequence: Synthetic oligonucleotide
aaggctccctcagttgc

SEQ ID NO: 2808 - DNA, 17 bp, Artificial Sequence
  Description of Artificial Sequence: Synthetic oligonucleotide
caaggctccctcagttg

SEQ ID NO: 2809 - DNA, 17 bp, Artificial Sequence
  Description of Artificial Sequence: Synthetic oligonucleotide
tcaaggctccctcagtt

SEQ ID NO: 2810 - DNA, 17 bp, Artificial Sequence
  Description of Artificial Sequence: Synthetic oligonucleotide
ttcaaggctccctcagt

SEQ ID NO: 2811 - DNA, 17 bp, Artificial Sequence
  Description of Artificial Sequence: Synthetic oligonucleotide
ttgcgggtgccaatgtg

SEQ ID NO: 2812 - DNA, 17 bp, Artificial Sequence
  Description of Artificial Sequence: Synthetic oligonucleotide
attgcgggtgccaatgt

SEQ ID NO: 2813 - DNA, 17 bp, Artificial Sequence
  Description of Artificial Sequence: Synthetic oligonucleotide
gattgcgggtgccaatg

SEQ ID NO: 2814 - DNA, 17 bp, Artificial Sequence
  Description of Artificial Sequence: Synthetic oligonucleotide
ggattgcgggtgccaat

SEQ ID NO: 2815 - DNA, 17 bp, Artificial Sequence
  Description of Artificial Sequence: Synthetic oligonucleotide
aggattgcgggtgccaa

SEQ ID NO: 2816 - DNA, 17 bp, Artificial Sequence
  Description of Artificial Sequence: Synthetic oligonucleotide
gaggaagttgtagcacg

SEQ ID NO: 2817 - DNA, 17 bp, Artificial Sequence
  Description of Artificial Sequence: Synthetic oligonucleotide
tgaggaagttgtagcac

SEQ ID NO: 2818 - DNA, 17 bp, Artificial Sequence
  Description of Artificial Sequence: Synthetic oligonucleotide
ttgaggaagttgtagca

SEQ ID NO: 2819 - DNA, 17 bp, Artificial Sequence
  Description of Artificial Sequence: Synthetic oligonucleotide
cttgaggaagttgtagc

SEQ ID NO: 2820 - DNA, 17 bp, Artificial Sequence
  Description of Artificial Sequence: Synthetic oligonucleotide
ccttgaggaagttgtag

SEQ ID NO: 2821 - DNA, 17 bp, Artificial Sequence
  Description of Artificial Sequence: Synthetic oligonucleotide
tccttgaggaagttgta

SEQ ID NO: 2822 - DNA, 17 bp, Artificial Sequence
  Description of Artificial Sequence: Synthetic oligonucleotide
ttccttgaggaagttgt

SEQ ID NO: 2823 - DNA, 17 bp, Artificial Sequence
  Description of Artificial Sequence: Synthetic oligonucleotide
gttccttgaggaagttg

SEQ ID NO: 2824 - DNA, 17 bp, Artificial Sequence
  Description of Artificial Sequence: Synthetic oligonucleotide
tgttccttgaggaagtt

SEQ ID NO: 2825 - DNA, 17 bp, Artificial Sequence
  Description of Artificial Sequence: Synthetic oligonucleotide
ttgttccttgaggaagt

SEQ ID NO: 2826 - DNA, 17 bp, Artificial Sequence
  Description of Artificial Sequence: Synthetic oligonucleotide
gttgttccttgaggaag

SEQ ID NO: 2827 - DNA, 17 bp, Artificial Sequence
  Description of Artificial Sequence: Synthetic oligonucleotide
tgttgttccttgaggaa

SEQ ID NO: 2828 - DNA, 17 bp, Artificial Sequence
  Description of Artificial Sequence: Synthetic oligonucleotide
atgttgttccttgagga

SEQ ID NO: 2829 - DNA, 17 bp, Artificial Sequence
  Description of Artificial Sequence: Synthetic oligonucleotide
aatgttgttccttgagg

SEQ ID NO: 2830 - DNA, 17 bp, Artificial Sequence
  Description of Artificial Sequence: Synthetic oligonucleotide
caatgttgttccttgag

SEQ ID NO: 2831 - DNA, 17 bp, Artificial Sequence
  Description of Artificial Sequence: Synthetic oligonucleotide
gcaatgttgttccttga

SEQ ID NO: 2832 - DNA, 17 bp, Artificial Sequence
  Description of Artificial Sequence: Synthetic oligonucleotide
ggcaatgttgttccttg

SEQ ID NO: 2833 - DNA, 17 bp, Artificial Sequence
  Description of Artificial Sequence: Synthetic oligonucleotide
tggcaatgttgttcctt

SEQ ID NO: 2834 - DNA, 17 bp, Artificial Sequence
  Description of Artificial Sequence: Synthetic oligonucleotide
ttggcaatgttgttcct

SEQ ID NO: 2835 - DNA, 17 bp, Artificial Sequence
  Description of Artificial Sequence: Synthetic oligonucleotide
tttggcaatgttgttcc

SEQ ID NO: 2836 - DNA, 17 bp, Artificial Sequence
  Description of Artificial Sequence: Synthetic oligonucleotide
ttttggcaatgttgttc

SEQ ID NO: 2837 - DNA, 17 bp, Artificial Sequence
  Description of Artificial Sequence: Synthetic oligonucleotide
cttttggcaatgttgtt

SEQ ID NO: 2838 - DNA, 17 bp, Artificial Sequence
  Description of Artificial Sequence: Synthetic oligonucleotide
ccttttggcaatgttgt

SEQ ID NO: 2839 - DNA, 17 bp, Artificial Sequence
  Description of Artificial Sequence: Synthetic oligonucleotide
gccttttggcaatgttg

SEQ ID NO: 2840 - DNA, 17 bp, Artificial Sequence
  Description of Artificial Sequence: Synthetic oligonucleotide
agccttttggcaatgtt

SEQ ID NO: 2841 - DNA, 17 bp, Artificial Sequence
  Description of Artificial Sequence: Synthetic oligonucleotide
aagccttttggcaatgt

SEQ ID NO: 2842 - DNA, 17 bp, Artificial Sequence
  Description of Artificial Sequence: Synthetic oligonucleotide
gaagccttttggcaatg

SEQ ID NO: 2843 - DNA, 17 bp, Artificial Sequence
  Description of Artificial Sequence: Synthetic oligonucleotide
agaagccttttggcaat

SEQ ID NO: 2844 - DNA, 17 bp, Artificial Sequence
  Description of Artificial Sequence: Synthetic oligonucleotide
tagaagccttttggcaa

SEQ ID NO: 2845 - DNA, 17 bp, Artificial Sequence
  Description of Artificial Sequence: Synthetic oligonucleotide
gtagaagccttttggca

SEQ ID NO: 2846 - DNA, 17 bp, Artificial Sequence
  Description of Artificial Sequence: Synthetic oligonucleotide
cgtagaagccttttggc

SEQ ID NO: 2847 - DNA, 17 bp, Artificial Sequence
  Description of Artificial Sequence: Synthetic oligonucleotide
gcgtagaagccttttgg

SEQ ID NO: 2848 - DNA, 17 bp, Artificial Sequence
  Description of Artificial Sequence: Synthetic oligonucleotide
tgcgtagaagccttttg

SEQ ID NO: 2849 - DNA, 17 bp, Artificial Sequence
  Description of Artificial Sequence: Synthetic oligonucleotide
ctgcgtagaagcctttt

SEQ ID NO: 2850 - DNA, 17 bp, Artificial Sequence
  Description of Artificial Sequence: Synthetic oligonucleotide
tctgcgtagaagccttt

SEQ ID NO: 2851 - DNA, 17 bp, Artificial Sequence
  Description of Artificial Sequence: Synthetic oligonucleotide
tgactgccgcctctgct

SEQ ID NO: 2852 - DNA, 17 bp, Artificial Sequence
  Description of Artificial Sequence: Synthetic oligonucleotide
ttgactgccgcctctgc

SEQ ID NO: 2853 - DNA, 17 bp, Artificial Sequence
  Description of Artificial Sequence: Synthetic oligonucleotide
cttgactgccgcctctg

SEQ ID NO: 2854 - DNA, 17 bp, Artificial Sequence
  Description of Artificial Sequence: Synthetic oligonucleotide
gcttgactgccgcctct

SEQ ID NO: 2855 - DNA, 17 bp, Artificial Sequence
  Description of Artificial Sequence: Synthetic oligonucleotide
ggcttgactgccgcctc

SEQ ID NO: 2856 - DNA, 17 bp, Artificial Sequence
  Description of Artificial Sequence: Synthetic oligonucleotide
aggcttgactgccgcct

SEQ ID NO: 2857 - DNA, 17 bp, Artificial Sequence
  Description of Artificial Sequence: Synthetic oligonucleotide
gaggcttgactgccgcc

SEQ ID NO: 2858 - DNA, 17 bp, Artificial Sequence
  Description of Artificial Sequence: Synthetic oligonucleotide
agaggcttgactgccgc

SEQ ID NO: 2859 - DNA, 17 bp, Artificial Sequence
  Description of Artificial Sequence: Synthetic oligonucleotide
aagaggcttgactgccg

SEQ ID NO: 2860 - DNA, 17 bp, Artificial Sequence
  Description of Artificial Sequence: Synthetic oligonucleotide
gaagaggcttgactgcc

SEQ ID NO: 2861 - DNA, 17 bp, Artificial Sequence
  Description of Artificial Sequence: Synthetic oligonucleotide
agaagaggcttgactgc

SEQ ID NO: 2862 - DNA, 17 bp, Artificial Sequence
  Description of Artificial Sequence: Synthetic oligonucleotide
gagaagaggcttgactg

SEQ ID NO: 2863 - DNA, 17 bp, Artificial Sequence
  Description of Artificial Sequence: Synthetic oligonucleotide
cgagaagaggcttgact

SEQ ID NO: 2864 - DNA, 17 bp, Artificial Sequence
  Description of Artificial Sequence: Synthetic oligonucleotide
gagttgaatttcttgaa

SEQ ID NO: 2865 - DNA, 17 bp, Artificial Sequence
  Description of Artificial Sequence: Synthetic oligonucleotide
ggagttgaatttcttga

SEQ ID NO: 2866 - DNA, 17 bp, Artificial Sequence
  Description of Artificial Sequence: Synthetic oligonucleotide
agctggttcaatctgtc

SEQ ID NO: 2867 - DNA, 17 bp, Artificial Sequence
  Description of Artificial Sequence: Synthetic oligonucleotide
aagctggttcaatctgt

SEQ ID NO: 2868 - DNA, 17 bp, Artificial Sequence
  Description of Artificial Sequence: Synthetic oligonucleotide
caagctggttcaatctg

SEQ ID NO: 2869 - DNA, 17 bp, Artificial Sequence
  Description of Artificial Sequence: Synthetic oligonucleotide
tcaagctggttcaatct

SEQ ID NO: 2870 - DNA, 17 bp, Artificial Sequence
  Description of Artificial Sequence: Synthetic oligonucleotide
ctcaagctggttcaatc

SEQ ID NO: 2871 - DNA, 17 bp, Artificial Sequence
  Description of Artificial Sequence: Synthetic oligonucleotide
tctcaagctggttcaat

SEQ ID NO: 2872 - DNA, 17 bp, Artificial Sequence
  Description of Artificial Sequence: Synthetic oligonucleotide
ctctcaagctggttcaa

SEQ ID NO: 2873 - DNA, 17 bp, Artificial Sequence
  Description of Artificial Sequence: Synthetic oligonucleotide
gctctcaagctggttca

SEQ ID NO: 2874 - DNA, 17 bp, Artificial Sequence
  Description of Artificial Sequence: Synthetic oligonucleotide
tgctctcaagctggttc

SEQ ID NO: 2875 - DNA, 17 bp, Artificial Sequence
  Description of Artificial Sequence: Synthetic oligonucleotide
ttgctctcaagctggtt

SEQ ID NO: 2876 - DNA, 17 bp, Artificial Sequence
  Description of Artificial Sequence: Synthetic oligonucleotide
tttgctctcaagctggt

SEQ ID NO: 2877 - DNA, 17 bp, Artificial Sequence
  Description of Artificial Sequence: Synthetic oligonucleotide
tgttggcctttaccaga

SEQ ID NO: 2878 - DNA, 17 bp, Artificial Sequence
  Description of Artificial Sequence: Synthetic oligonucleotide
ttgttggcctttaccag

SEQ ID NO: 2879 - DNA, 17 bp, Artificial Sequence
  Description of Artificial Sequence: Synthetic oligonucleotide
gttgttggcctttacca

SEQ ID NO: 2880 - DNA, 17 bp, Artificial Sequence
  Description of Artificial Sequence: Synthetic oligonucleotide
tgttgttggcctttacc

SEQ ID NO: 2881 - DNA, 17 bp, Artificial Sequence
  Description of Artificial Sequence: Synthetic oligonucleotide
ttgttgttggcctttac

SEQ ID NO: 2882 - DNA, 17 bp, Artificial Sequence
  Description of Artificial Sequence: Synthetic oligonucleotide
gttgttgttggccttta

SEQ ID NO: 2883 - DNA, 17 bp, Artificial Sequence
  Description of Artificial Sequence: Synthetic oligonucleotide
tgttgttgttggccttt

SEQ ID NO: 2884 - DNA, 17 bp, Artificial Sequence
  Description of Artificial Sequence: Synthetic oligonucleotide
ttgttgttgttggcctt

SEQ ID NO: 2885 - DNA, 17 bp, Artificial Sequence
  Description of Artificial Sequence: Synthetic oligonucleotide
cttgttgttgttggcct

SEQ ID NO: 2886 - DNA, 17 bp, Artificial Sequence
  Description of Artificial Sequence: Synthetic oligonucleotide
ccttgttgttgttggcc

SEQ ID NO: 2887 - DNA, 17 bp, Artificial Sequence
  Description of Artificial Sequence: Synthetic oligonucleotide
gccttgttgttgttggc

SEQ ID NO: 2888 - DNA, 17 bp, Artificial Sequence
  Description of Artificial Sequence: Synthetic oligonucleotide
ggccttgttgttgttgg

SEQ ID NO: 2889 - DNA, 17 bp, Artificial Sequence
  Description of Artificial Sequence: Synthetic oligonucleotide
tggccttgttgttgttg

SEQ ID NO: 2890 - DNA, 17 bp, Artificial Sequence
  Description of Artificial Sequence: Synthetic oligonucleotide
ttggccttgttgttgtt

SEQ ID NO: 2891 - DNA, 17 bp, Artificial Sequence
  Description of Artificial Sequence: Synthetic oligonucleotide
tttggccttgttgttgt

SEQ ID NO: 2892 - DNA, 17 bp, Artificial Sequence
  Description of Artificial Sequence: Synthetic oligonucleotide
gtttggccttgttgttg

SEQ ID NO: 2893 - DNA, 17 bp, Artificial Sequence
  Description of Artificial Sequence: Synthetic oligonucleotide
agtttggccttgttgtt

SEQ ID NO: 2894 - DNA, 17 bp, Artificial Sequence
  Description of Artificial Sequence: Synthetic oligonucleotide
cagtttggccttgttgt

SEQ ID NO: 2895 - DNA, 17 bp, Artificial Sequence
  Description of Artificial Sequence: Synthetic oligonucleotide
acagtttggccttgttg

SEQ ID NO: 2896 - DNA, 17 bp, Artificial Sequence
  Description of Artificial Sequence: Synthetic oligonucleotide
gacagtttggccttgtt

SEQ ID NO: 2897 - DNA, 17 bp, Artificial Sequence
  Description of Artificial Sequence: Synthetic oligonucleotide
tgacagtttggccttgt

SEQ ID NO: 2898 - DNA, 17 bp, Artificial Sequence
  Description of Artificial Sequence: Synthetic oligonucleotide
gtgacagtttggccttg

SEQ ID NO: 2899 - DNA, 17 bp, Artificial Sequence
  Description of Artificial Sequence: Synthetic oligonucleotide
agtgacagtttggcctt

SEQ ID NO: 2900 - DNA, 17 bp, Artificial Sequence
  Description of Artificial Sequence: Synthetic oligonucleotide
tagtgacagtttggcct

SEQ ID NO: 2901 - DNA, 17 bp, Artificial Sequence
  Description of Artificial Sequence: Synthetic oligonucleotide
ttagtgacagtttggcc

SEQ ID NO: 2902 - DNA, 17 bp, Artificial Sequence
  Description of Artificial Sequence: Synthetic oligonucleotide
cttagtgacagtttggc

SEQ ID NO: 2903 - DNA, 17 bp, Artificial Sequence
  Description of Artificial Sequence: Synthetic oligonucleotide
tcttagtgacagtttgg

SEQ ID NO: 2904 - DNA, 17 bp, Artificial Sequence
  Description of Artificial Sequence: Synthetic oligonucleotide
ttcttagtgacagtttg

SEQ ID NO: 2905 - DNA, 17 bp, Artificial Sequence
  Description of Artificial Sequence: Synthetic oligonucleotide
tttcttagtgacagttt

SEQ ID NO: 2906 - DNA, 17 bp, Artificial Sequence
  Description of Artificial Sequence: Synthetic oligonucleotide
atttcttagtgacagtt

SEQ ID NO: 2907 - DNA, 17 bp, Artificial Sequence
  Description of Artificial Sequence: Synthetic oligonucleotide
gatttcttagtgacagt

SEQ ID NO: 2908 - DNA, 17 bp, Artificial Sequence
  Description of Artificial Sequence: Synthetic oligonucleotide
agatttcttagtgacag

SEQ ID NO: 2909 - DNA, 17 bp, Artificial Sequence
  Description of Artificial Sequence: Synthetic oligonucleotide
cagatttcttagtgaca

SEQ ID NO: 2910 - DNA, 17 bp, Artificial Sequence
  Description of Artificial Sequence: Synthetic oligonucleotide
gcagatttcttagtgac

SEQ ID NO: 2911 - DNA, 17 bp, Artificial Sequence
  Description of Artificial Sequence: Synthetic oligonucleotide
agcagatttcttagtga

SEQ ID NO: 2912 - DNA, 17 bp, Artificial Sequence
  Description of Artificial Sequence: Synthetic oligonucleotide
cagcagatttcttagtg

SEQ ID NO: 2913 - DNA, 17 bp, Artificial Sequence
  Description of Artificial Sequence: Synthetic oligonucleotide
gcagcagatttcttagt

SEQ ID NO: 2914 - DNA, 17 bp, Artificial Sequence
  Description of Artificial Sequence: Synthetic oligonucleotide
agcagcagatttcttag

SEQ ID NO: 2915 - DNA, 17 bp, Artificial Sequence
  Description of Artificial Sequence: Synthetic oligonucleotide
cagcagcagatttctta

SEQ ID NO: 2916 - DNA, 17 bp, Artificial Sequence
  Description of Artificial Sequence: Synthetic oligonucleotide
tcagcagcagatttctt

SEQ ID NO: 2917 - DNA, 17 bp, Artificial Sequence
  Description of Artificial Sequence: Synthetic oligonucleotide
ctcagcagcagatttct

SEQ ID NO: 2918 - DNA, 17 bp, Artificial Sequence
  Description of Artificial Sequence: Synthetic oligonucleotide
cctcagcagcagatttc

SEQ ID NO: 2919 - DNA, 17 bp, Artificial Sequence
  Description of Artificial Sequence: Synthetic oligonucleotide
gcctcagcagcagattt

SEQ ID NO: 2920 - DNA, 17 bp, Artificial Sequence
  Description of Artificial Sequence: Synthetic oligonucleotide
gttccttgtctgattag

SEQ ID NO: 2921 - DNA, 17 bp, Artificial Sequence
  Description of Artificial Sequence: Synthetic oligonucleotide
agttccttgtctgatta

SEQ ID NO: 2922 - DNA, 17 bp, Artificial Sequence
  Description of Artificial Sequence: Synthetic oligonucleotide
cagttccttgtctgatt

SEQ ID NO: 2923 - DNA, 17 bp, Artificial Sequence
  Description of Artificial Sequence: Synthetic oligonucleotide
tcagttccttgtctgat

SEQ ID NO: 2924 - DNA, 17 bp, Artificial Sequence
  Description of Artificial Sequence: Synthetic oligonucleotide
atcagttccttgtctga

SEQ ID NO: 2925 - DNA, 17 bp, Artificial Sequence
  Description of Artificial Sequence: Synthetic oligonucleotide
aatcagttccttgtctg

SEQ ID NO: 2926 - DNA, 17 bp, Artificial Sequence
  Description of Artificial Sequence: Synthetic oligonucleotide
taatcagttccttgtct

SEQ ID NO: 2927 - DNA, 17 bp, Artificial Sequence
  Description of Artificial Sequence: Synthetic oligonucleotide
gtaatcagttccttgtc

SEQ ID NO: 2928 - DNA, 17 bp, Artificial Sequence
  Description of Artificial Sequence: Synthetic oligonucleotide
tgtaatcagttccttgt

SEQ ID NO: 2929 - DNA, 17 bp, Artificial Sequence
  Description of Artificial Sequence: Synthetic oligonucleotide
ttgtaatcagttccttg

SEQ ID NO: 2930 - DNA, 17 bp, Artificial Sequence
  Description of Artificial Sequence: Synthetic oligonucleotide
tttgtaatcagttcctt

SEQ ID NO: 2931 - DNA, 17 bp, Artificial Sequence
  Description of Artificial Sequence: Synthetic oligonucleotide
gtttgtaatcagttcct

SEQ ID NO: 2932 - DNA, 17 bp, Artificial Sequence
  Description of Artificial Sequence: Synthetic oligonucleotide
tgtttgtaatcagttcc

SEQ ID NO: 2933 - DNA, 17 bp, Artificial Sequence
  Description of Artificial Sequence: Synthetic oligonucleotide
tgtgcaatttgcggcca

SEQ ID NO: 2934 - DNA, 17 bp, Artificial Sequence
  Description of Artificial Sequence: Synthetic oligonucleotide
ttgtgcaatttgcggcc

SEQ ID NO: 2935 - DNA, 17 bp, Artificial Sequence
  Description of Artificial Sequence: Synthetic oligonucleotide
attgtgcaatttgcggc

SEQ ID NO: 2936 - DNA, 17 bp, Artificial Sequence
  Description of Artificial Sequence: Synthetic oligonucleotide
aattgtgcaatttgcgg

SEQ ID NO: 2937 - DNA, 17 bp, Artificial Sequence
  Description of Artificial Sequence: Synthetic oligonucleotide
aaattgtgcaatttgcg

SEQ ID NO: 2938 - DNA, 17 bp, Artificial Sequence
  Description of Artificial Sequence: Synthetic oligonucleotide
caaattgtgcaatttgc

SEQ ID NO: 2939 - DNA, 17 bp, Artificial Sequence
  Description of Artificial Sequence: Synthetic oligonucleotide
gcaaattgtgcaatttg

SEQ ID NO: 2940 - DNA, 17 bp, Artificial Sequence
  Description of Artificial Sequence: Synthetic oligonucleotide
acttccatgccaatgcg

SEQ ID NO: 2941 - DNA, 17 bp, Artificial Sequence
  Description of Artificial Sequence: Synthetic oligonucleotide
gacttccatgccaatgc

SEQ ID NO: 2942 - DNA, 17 bp, Artificial Sequence
  Description of Artificial Sequence: Synthetic oligonucleotide
tgacttccatgccaatg

SEQ ID NO: 2943 - DNA, 17 bp, Artificial Sequence
  Description of Artificial Sequence: Synthetic oligonucleotide
gtgacttccatgccaat

SEQ ID NO: 2944 - DNA, 17 bp, Artificial Sequence
  Description of Artificial Sequence: Synthetic oligonucleotide
tgtgacttccatgccaa

SEQ ID NO: 2945 - DNA, 17 bp, Artificial Sequence
  Description of Artificial Sequence: Synthetic oligonucleotide
gtgtgacttccatgcca

SEQ ID NO: 2946 - DNA, 17 bp, Artificial Sequence
  Description of Artificial Sequence: Synthetic oligonucleotide
ggtgtgacttccatgcc

SEQ ID NO: 2947 - DNA, 17 bp, Artificial Sequence
  Description of Artificial Sequence: Synthetic oligonucleotide
aggtgtgacttccatgc

SEQ ID NO: 2948 - DNA, 17 bp, Artificial Sequence
  Description of Artificial Sequence: Synthetic oligonucleotide
aaggtgtgacttccatg

SEQ ID NO: 2949 - DNA, 17 bp, Artificial Sequence
  Description of Artificial Sequence: Synthetic oligonucleotide
gaaggtgtgacttccat

SEQ ID NO: 2950 - DNA, 17 bp, Artificial Sequence
  Description of Artificial Sequence: Synthetic oligonucleotide
cgaaggtgtgacttcca

SEQ ID NO: 2951 - DNA, 17 bp, Artificial Sequence
  Description of Artificial Sequence: Synthetic oligonucleotide
ccgaaggtgtgacttcc

SEQ ID NO: 2952 - DNA, 17 bp, Artificial Sequence
  Description of Artificial Sequence: Synthetic oligonucleotide
cccgaaggtgtgacttc

SEQ ID NO: 2953 - DNA, 17 bp, Artificial Sequence
  Description of Artificial Sequence: Synthetic oligonucleotide
tcccgaaggtgtgactt

SEQ ID NO: 2954 - DNA, 17 bp, Artificial Sequence
  Description of Artificial Sequence: Synthetic oligonucleotide
ttcccgaaggtgtgact

SEQ ID NO: 2955 - DNA, 17 bp, Artificial Sequence
  Description of Artificial Sequence: Synthetic oligonucleotide
gttcccgaaggtgtgac

SEQ ID NO: 2956 - DNA, 17 bp, Artificial Sequence
  Description of Artificial Sequence: Synthetic oligonucleotide
tctttgtcatccaattt

SEQ ID NO: 2957 - DNA, 17 bp, Artificial Sequence
  Description of Artificial Sequence: Synthetic oligonucleotide
atctttgtcatccaatt

SEQ ID NO: 2958 - DNA, 17 bp, Artificial Sequence
  Description of Artificial Sequence: Synthetic oligonucleotide
gatctttgtcatccaat

SEQ ID NO: 2959 - DNA, 17 bp, Artificial Sequence
  Description of Artificial Sequence: Synthetic oligonucleotide
ggatctttgtcatccaa

SEQ ID NO: 2960 - DNA, 17 bp, Artificial Sequence
  Description of Artificial Sequence: Synthetic oligonucleotide
tggatctttgtcatcca

SEQ ID NO: 2961 - DNA, 17 bp, Artificial Sequence
  Description of Artificial Sequence: Synthetic oligonucleotide
gttttgtatgcgtcaat

SEQ ID NO: 2962 - DNA, 17 bp, Artificial Sequence
  Description of Artificial Sequence: Synthetic oligonucleotide
tgttttgtatgcgtcaa

SEQ ID NO: 2963 - DNA, 17 bp, Artificial Sequence
  Description of Artificial Sequence: Synthetic oligonucleotide
atgttttgtatgcgtca

SEQ ID NO: 2964 - DNA, 17 bp, Artificial Sequence
  Description of Artificial Sequence: Synthetic oligonucleotide
aatgttttgtatgcgtc

SEQ ID NO: 2965 - DNA, 17 bp, Artificial Sequence
  Description of Artificial Sequence: Synthetic oligonucleotide
gaatgttttgtatgcgt

SEQ ID NO: 2966 - DNA, 17 bp, Artificial Sequence
  Description of Artificial Sequence: Synthetic oligonucleotide
ggaatgttttgtatgcg

SEQ ID NO: 2967 - DNA, 17 bp, Artificial Sequence
  Description of Artificial Sequence: Synthetic oligonucleotide
gggaatgttttgtatgc

SEQ ID NO: 2968 - DNA, 17 bp, Artificial Sequence
  Description of Artificial Sequence: Synthetic oligonucleotide
tgggaatgttttgtatg

SEQ ID NO: 2969 - DNA, 17 bp, Artificial Sequence
  Description of Artificial Sequence: Synthetic oligonucleotide
gtgggaatgttttgtat

SEQ ID NO: 2970 - DNA, 17 bp, Artificial Sequence
  Description of Artificial Sequence: Synthetic oligonucleotide
ggtgggaatgttttgta

SEQ ID NO: 2971 - DNA, 17 bp, Artificial Sequence
  Description of Artificial Sequence: Synthetic oligonucleotide
tggtgggaatgttttgt

SEQ ID NO: 2972 - DNA, 17 bp, Artificial Sequence
  Description of Artificial Sequence: Synthetic oligonucleotide
ttggtgggaatgttttg

SEQ ID NO: 2973 - DNA, 17 bp, Artificial Sequence
  Description of Artificial Sequence: Synthetic oligonucleotide
gttggtgggaatgtttt

SEQ ID NO: 2974 - DNA, 17 bp, Artificial Sequence
  Description of Artificial Sequence: Synthetic oligonucleotide
tgttggtgggaatgttt

SEQ ID NO: 2975 - DNA, 17 bp, Artificial Sequence
  Description of Artificial Sequence: Synthetic oligonucleotide
ctgttggtgggaatgtt

SEQ ID NO: 2976 - DNA, 17 bp, Artificial Sequence
  Description of Artificial Sequence: Synthetic oligonucleotide
tctgttggtgggaatgt

SEQ ID NO: 2977 - DNA, 17 bp, Artificial Sequence
  Description of Artificial Sequence: Synthetic oligonucleotide
ctctgttggtgggaatg

SEQ ID NO: 2978 - DNA, 17 bp, Artificial Sequence
  Description of Artificial Sequence: Synthetic oligonucleotide
gctctgttggtgggaat

SEQ ID NO: 2979 - DNA, 17 bp, Artificial Sequence
  Description of Artificial Sequence: Synthetic oligonucleotide
ggctctgttggtgggaa

SEQ ID NO: 2980 - DNA, 17 bp, Artificial Sequence
  Description of Artificial Sequence: Synthetic oligonucleotide
aggctctgttggtggga

SEQ ID NO: 2981 - DNA, 17 bp, Artificial Sequence
  Description of Artificial Sequence: Synthetic oligonucleotide
taggctctgttggtggg

SEQ ID NO: 2982 - DNA, 17 bp, Artificial Sequence
  Description of Artificial Sequence: Synthetic oligonucleotide
ttaggctctgttggtgg

SEQ ID NO: 2983 - DNA, 17 bp, Artificial Sequence
  Description of Artificial Sequence: Synthetic oligonucleotide
tttaggctctgttggtg

SEQ ID NO: 2984 - DNA, 17 bp, Artificial Sequence
  Description of Artificial Sequence: Synthetic oligonucleotide
ttttaggctctgttggt

SEQ ID NO: 2985 - DNA, 17 bp, Artificial Sequence
  Description of Artificial Sequence: Synthetic oligonucleotide
tttttaggctctgttgg

SEQ ID NO: 2986 - DNA, 17 bp, Artificial Sequence
  Description of Artificial Sequence: Synthetic oligonucleotide
ctttttaggctctgttg

SEQ ID NO: 2987 - DNA, 17 bp, Artificial Sequence
  Description of Artificial Sequence: Synthetic oligonucleotide
cctttttaggctctgtt

SEQ ID NO: 2988 - DNA, 17 bp, Artificial Sequence
  Description of Artificial Sequence: Synthetic oligonucleotide
tcctttttaggctctgt

SEQ ID NO: 2989 - DNA, 17 bp, Artificial Sequence
  Description of Artificial Sequence: Synthetic oligonucleotide
gtcctttttaggctctg

SEQ ID NO: 2990 - DNA, 17 bp, Artificial Sequence
  Description of Artificial Sequence: Synthetic oligonucleotide
tgtcctttttaggctct

SEQ ID NO: 2991 - DNA, 17 bp, Artificial Sequence
  Description of Artificial Sequence: Synthetic oligonucleotide
ttgtcctttttaggctc

SEQ ID NO: 2992 - DNA, 17 bp, Artificial Sequence
  Description of Artificial Sequence: Synthetic oligonucleotide
tttgtcctttttaggct

SEQ ID NO: 2993 - DNA, 17 bp, Artificial Sequence
  Description of Artificial Sequence: Synthetic oligonucleotide
ttttgtcctttttaggc

SEQ ID NO: 2994 - DNA, 17 bp, Artificial Sequence
  Description of Artificial Sequence: Synthetic oligonucleotide
tttttgtcctttttagg

SEQ ID NO: 2995 - DNA, 17 bp, Artificial Sequence
  Description of Artificial Sequence: Synthetic oligonucleotide
ctttttgtcctttttag

SEQ ID NO: 2996 - DNA, 17 bp, Artificial Sequence
  Description of Artificial Sequence: Synthetic oligonucleotide
tctttttgtccttttta

SEQ ID NO: 2997 - DNA, 17 bp, Artificial Sequence
  Description of Artificial Sequence: Synthetic oligonucleotide
ttctttttgtccttttt

SEQ ID NO: 2998 - DNA, 17 bp, Artificial Sequence
  Description of Artificial Sequence: Synthetic oligonucleotide
ggaagaagagtcacagt

SEQ ID NO: 2999 - DNA, 17 bp, Artificial Sequence
  Description of Artificial Sequence: Synthetic oligonucleotide
aggaagaagagtcacag

SEQ ID NO: 3000 - DNA, 17 bp, Artificial Sequence
  Description of Artificial Sequence: Synthetic oligonucleotide
caggaagaagagtcaca

SEQ ID NO: 3001 - DNA, 17 bp, Artificial Sequence
  Description of Artificial Sequence: Synthetic oligonucleotide
gcaggaagaagagtcac

SEQ ID NO: 3002 - DNA, 17 bp, Artificial Sequence
  Description of Artificial Sequence: Synthetic oligonucleotide
atctgccttgtgtggtc

SEQ ID NO: 3003 - DNA, 17 bp, Artificial Sequence
  Description of Artificial Sequence: Synthetic oligonucleotide
catctgccttgtgtggt

SEQ ID NO: 3004 - DNA, 17 bp, Artificial Sequence
  Description of Artificial Sequence: Synthetic oligonucleotide
ccatctgccttgtgtgg

SEQ ID NO: 3005 - DNA, 17 bp, Artificial Sequence
  Description of Artificial Sequence: Synthetic oligonucleotide
cccatctgccttgtgtg

SEQ ID NO: 3006 - DNA, 17 bp, Artificial Sequence
  Description of Artificial Sequence: Synthetic oligonucleotide
gcccatctgccttgtgt

SEQ ID NO: 3007 - DNA, 17 bp, Artificial Sequence
  Description of Artificial Sequence: Synthetic oligonucleotide
agcccatctgccttgtg

SEQ ID NO: 3008 - DNA, 17 bp, Artificial Sequence
  Description of Artificial Sequence: Synthetic oligonucleotide
tagcccatctgccttgt

SEQ ID NO: 3009 - DNA, 17 bp, Artificial Sequence
  Description of Artificial Sequence: Synthetic oligonucleotide
atagcccatctgccttg

SEQ ID NO: 3010 - DNA, 17 bp, Artificial Sequence
  Description of Artificial Sequence: Synthetic oligonucleotide
gcacaagagtagactat

SEQ ID NO: 3011 - DNA, 17 bp, Artificial Sequence
  Description of Artificial Sequence: Synthetic oligonucleotide
tgcacaagagtagacta

SEQ ID NO: 3012 - DNA, 17 bp, Artificial Sequence
  Description of Artificial Sequence: Synthetic oligonucleotide
ctgcacaagagtagact

SEQ ID NO: 3013 - DNA, 17 bp, Artificial Sequence
  Description of Artificial Sequence: Synthetic oligonucleotide
tctgcacaagagtagac

SEQ ID NO: 3014 - DNA, 17 bp, Artificial Sequence
  Description of Artificial Sequence: Synthetic oligonucleotide
ttctgcacaagagtaga

SEQ ID NO: 3015 - DNA, 17 bp, Artificial Sequence
  Description of Artificial Sequence: Synthetic oligonucleotide
attctgcacaagagtag

SEQ ID NO: 3016 - DNA, 17 bp, Artificial Sequence
  Description of Artificial Sequence: Synthetic oligonucleotide
cattctgcacaagagta

SEQ ID NO: 3017 - DNA, 17 bp, Artificial Sequence
  Description of Artificial Sequence: Synthetic oligonucleotide
tcattctgcacaagagt

SEQ ID NO: 3018 - DNA, 17 bp, Artificial Sequence
  Description of Artificial Sequence: Synthetic oligonucleotide
ttcattctgcacaagag

SEQ ID NO: 3019 - DNA, 17 bp, Artificial Sequence
  Description of Artificial Sequence: Synthetic oligonucleotide
attcattctgcacaaga

SEQ ID NO: 3020 - DNA, 17 bp, Artificial Sequence
  Description of Artificial Sequence: Synthetic oligonucleotide
aattcattctgcacaag

SEQ ID NO: 3021 - DNA, 17 bp, Artificial Sequence
  Description of Artificial Sequence: Synthetic oligonucleotide
gaattcattctgcacaa

SEQ ID NO: 3022 - DNA, 17 bp, Artificial Sequence
  Description of Artificial Sequence: Synthetic oligonucleotide
agaattcattctgcaca

SEQ ID NO: 3023 - DNA, 17 bp, Artificial Sequence
  Description of Artificial Sequence: Synthetic oligonucleotide
gagaattcattctgcac

SEQ ID NO: 3024 - DNA, 17 bp, Artificial Sequence
  Description of Artificial Sequence: Synthetic oligonucleotide
cgagaattcattctgca

SEQ ID NO: 3025 - DNA, 17 bp, Artificial Sequence
  Description of Artificial Sequence: Synthetic oligonucleotide
acgagaattcattctgc

SEQ ID NO: 3026 - DNA, 17 bp, Artificial Sequence
  Description of Artificial Sequence: Synthetic oligonucleotide
tacgagaattcattctg

SEQ ID NO: 3027 - DNA, 17 bp, Artificial Sequence
  Description of Artificial Sequence: Synthetic oligonucleotide
gagattaaagttaacta

SEQ ID NO: 3028 - DNA, 17 bp, Artificial Sequence
  Description of Artificial Sequence: Synthetic oligonucleotide
tgagattaaagttaact

SEQ ID NO: 3029 - DNA, 17 bp, Artificial Sequence
  Description of Artificial Sequence: Synthetic oligonucleotide
gtgagattaaagttaac

SEQ ID NO: 3030 - DNA, 17 bp, Artificial Sequence
  Description of Artificial Sequence: Synthetic oligonucleotide
tgtgagattaaagttaa

SEQ ID NO: 3031 - DNA, 17 bp, Artificial Sequence
  Description of Artificial Sequence: Synthetic oligonucleotide
atgtgagattaaagtta

SEQ ID NO: 3032 - DNA, 17 bp, Artificial Sequence
  Description of Artificial Sequence: Synthetic oligonucleotide
tatgtgagattaaagtt

SEQ ID NO: 3033 - DNA, 17 bp, Artificial Sequence
  Description of Artificial Sequence: Synthetic oligonucleotide
ctatgtgagattaaagt

SEQ ID NO: 3034 - DNA, 17 bp, Artificial Sequence
  Description of Artificial Sequence: Synthetic oligonucleotide
gctatgtgagattaaag

SEQ ID NO: 3035 - DNA, 17 bp, Artificial Sequence
  Description of Artificial Sequence: Synthetic oligonucleotide
tgctatgtgagattaaa

SEQ ID NO: 3036 - DNA, 17 bp, Artificial Sequence
  Description of Artificial Sequence: Synthetic oligonucleotide
ttgctatgtgagattaa

SEQ ID NO: 3037 - DNA, 17 bp, Artificial Sequence
  Description of Artificial Sequence: Synthetic oligonucleotide
attgctatgtgagatta

SEQ ID NO: 3038 - DNA, 17 bp, Artificial Sequence
  Description of Artificial Sequence: Synthetic oligonucleotide
gattgctatgtgagatt

SEQ ID NO: 3039 - DNA, 17 bp, Artificial Sequence
  Description of Artificial Sequence: Synthetic oligonucleotide
agattgctatgtgagat

SEQ ID NO: 3040 - DNA, 17 bp, Artificial Sequence
  Description of Artificial Sequence: Synthetic oligonucleotide
aagattgctatgtgaga

SEQ ID NO: 3041 - DNA, 17 bp, Artificial Sequence
  Description of Artificial Sequence: Synthetic oligonucleotide
aaagattgctatgtgag

SEQ ID NO: 3042 - DNA, 17 bp, Artificial Sequence
  Description of Artificial Sequence: Synthetic oligonucleotide
taaagattgctatgtga

SEQ ID NO: 3043 - DNA, 17 bp, Artificial Sequence
  Description of Artificial Sequence: Synthetic oligonucleotide
ttaaagattgctatgtg

SEQ ID NO: 3044 - DNA, 17 bp, Artificial Sequence
  Description of Artificial Sequence: Synthetic oligonucleotide
attaaagattgctatgt

SEQ ID NO: 3045 - DNA, 17 bp, Artificial Sequence
  Description of Artificial Sequence: Synthetic oligonucleotide
gattaaagattgctatg

SEQ ID NO: 3046 - DNA, 17 bp, Artificial Sequence
  Description of Artificial Sequence: Synthetic oligonucleotide
tgattaaagattgctat

SEQ ID NO: 3047 - DNA, 17 bp, Artificial Sequence
  Description of Artificial Sequence: Synthetic oligonucleotide
ctccctaatgttacaca

SEQ ID NO: 3048 - DNA, 17 bp, Artificial Sequence
  Description of Artificial Sequence: Synthetic oligonucleotide
cctccctaatgttacac

SEQ ID NO: 3049 - DNA, 17 bp, Artificial Sequence
  Description of Artificial Sequence: Synthetic oligonucleotide
tcctccctaatgttaca

SEQ ID NO: 3050 - DNA, 17 bp, Artificial Sequence
  Description of Artificial Sequence: Synthetic oligonucleotide
gtcctccctaatgttac

SEQ ID NO: 3051 - DNA, 17 bp, Artificial Sequence
  Description of Artificial Sequence: Synthetic oligonucleotide
agtcctccctaatgtta

SEQ ID NO: 3052 - DNA, 17 bp, Artificial Sequence
  Description of Artificial Sequence: Synthetic oligonucleotide
aagtcctccctaatgtt

SEQ ID NO: 3053 - DNA, 17 bp, Artificial Sequence
  Description of Artificial Sequence: Synthetic oligonucleotide
caagtcctccctaatgt

SEQ ID NO: 3054 - DNA, 17 bp, Artificial Sequence
  Description of Artificial Sequence: Synthetic oligonucleotide
tcaagtcctccctaatg

SEQ ID NO: 3055 - DNA, 17 bp, Artificial Sequence
  Description of Artificial Sequence: Synthetic oligonucleotide
ttcaagtcctccctaat

SEQ ID NO: 3056 - DNA, 17 bp, Artificial Sequence
  Description of Artificial Sequence: Synthetic oligonucleotide
tttcaagtcctccctaa

SEQ ID NO: 3057 - DNA, 17 bp, Artificial Sequence
  Description of Artificial Sequence: Synthetic oligonucleotide
ctttcaagtcctcccta

SEQ ID NO: 3058 - DNA, 17 bp, Artificial Sequence
  Description of Artificial Sequence: Synthetic oligonucleotide
tctttcaagtcctccct

SEQ ID NO: 3059 - DNA, 17 bp, Artificial Sequence
  Description of Artificial Sequence: Synthetic oligonucleotide
ctctttcaagtcctccc

SEQ ID NO: 3060 - DNA, 17 bp, Artificial Sequence
  Description of Artificial Sequence: Synthetic oligonucleotide
gctctttcaagtcctcc

SEQ ID NO: 3061 - DNA, 17 bp, Artificial Sequence
  Description of Artificial Sequence: Synthetic oligonucleotide
ggctctttcaagtcctc

SEQ ID NO: 3062 - DNA, 17 bp, Artificial Sequence
  Description of Artificial Sequence: Synthetic oligonucleotide
tggctctttcaagtcct

SEQ ID NO: 3063 - DNA, 17 bp, Artificial Sequence
  Description of Artificial Sequence: Synthetic oligonucleotide
gtggctctttcaagtcc

SEQ ID NO: 3064 - DNA, 17 bp, Artificial Sequence
  Description of Artificial Sequence: Synthetic oligonucleotide
ggtggctctttcaagtc

SEQ ID NO: 3065 - DNA, 17 bp, Artificial Sequence
  Description of Artificial Sequence: Synthetic oligonucleotide
tggtggctctttcaagt

SEQ ID NO: 3066 - DNA, 17 bp, Artificial Sequence
  Description of Artificial Sequence: Synthetic oligonucleotide
gtggtggctctttcaag

SEQ ID NO: 3067 - DNA, 17 bp, Artificial Sequence
  Description of Artificial Sequence: Synthetic oligonucleotide
tgtggtggctctttcaa

SEQ ID NO: 3068 - DNA, 17 bp, Artificial Sequence
  Description of Artificial Sequence: Synthetic oligonucleotide
atgtggtggctctttca

SEQ ID NO: 3069 - DNA, 17 bp, Artificial Sequence
  Description of Artificial Sequence: Synthetic oligonucleotide
aatgtggtggctctttc

SEQ ID NO: 3070 - DNA, 17 bp, Artificial Sequence
  Description of Artificial Sequence: Synthetic oligonucleotide
aaatgtggtggctcttt

SEQ ID NO: 3071 - DNA, 17 bp, Artificial Sequence
  Description of Artificial Sequence: Synthetic oligonucleotide
aaaatgtggtggctctt

SEQ ID NO: 3072 - DNA, 17 bp, Artificial Sequence
  Description of Artificial Sequence: Synthetic oligonucleotide
gaaaatgtggtggctct

SEQ ID NO: 3073 - DNA, 17 bp, Artificial Sequence
  Description of Artificial Sequence: Synthetic oligonucleotide
tgaaaatgtggtggctc

SEQ ID NO: 3074 - DNA, 17 bp, Artificial Sequence
  Description of Artificial Sequence: Synthetic oligonucleotide
tactccgcgtggcctcg

SEQ ID NO: 3075 - DNA, 17 bp, Artificial Sequence
  Description of Artificial Sequence: Synthetic oligonucleotide
gtactccgcgtggcctc

SEQ ID NO: 3076 - DNA, 17 bp, Artificial Sequence
  Description of Artificial Sequence: Synthetic oligonucleotide
cgtactccgcgtggcct

SEQ ID NO: 3077 - DNA, 17 bp, Artificial Sequence
  Description of Artificial Sequence: Synthetic oligonucleotide
tcgtactccgcgtggcc

SEQ ID NO: 3078 - DNA, 17 bp, Artificial Sequence
  Description of Artificial Sequence: Synthetic oligonucleotide
atcgtactccgcgtggc

SEQ ID NO: 3079 - DNA, 17 bp, Artificial Sequence
  Description of Artificial Sequence: Synthetic oligonucleotide
gatcgtactccgcgtgg

SEQ ID NO: 3080 - DNA, 17 bp, Artificial Sequence
  Description of Artificial Sequence: Synthetic oligonucleotide
cgatcgtactccgcgtg

SEQ ID NO: 3081 - DNA, 17 bp, Artificial Sequence
  Description of Artificial Sequence: Synthetic oligonucleotide
tcgatcgtactccgcgt

SEQ ID NO: 3082 - DNA, 17 bp, Artificial Sequence
  Description of Artificial Sequence: Synthetic oligonucleotide
ctcgatcgtactccgcg

SEQ ID NO: 3083 - DNA, 17 bp, Artificial Sequence
  Description of Artificial Sequence: Synthetic oligonucleotide
cagctctccctagcatt

SEQ ID NO: 3084 - DNA, 17 bp, Artificial Sequence
  Description of Artificial Sequence: Synthetic oligonucleotide
gcagctctccctagcat

SEQ ID NO: 3085 - DNA, 17 bp, Artificial Sequence
  Description of Artificial Sequence: Synthetic oligonucleotide
ggcagctctccctagca

SEQ ID NO: 3086 - DNA, 17 bp, Artificial Sequence
  Description of Artificial Sequence: Synthetic oligonucleotide
aggcagctctccctagc

SEQ ID NO: 3087 - DNA, 17 bp, Artificial Sequence
  Description of Artificial Sequence: Synthetic oligonucleotide
taggcagctctccctag

SEQ ID NO: 3088 - DNA, 17 bp, Artificial Sequence
  Description of Artificial Sequence: Synthetic oligonucleotide
ataggcagctctcccta

SEQ ID NO: 3089 - DNA, 17 bp, Artificial Sequence
  Description of Artificial Sequence: Synthetic oligonucleotide
tataggcagctctccct

SEQ ID NO: 3090 - DNA, 17 bp, Artificial Sequence
  Description of Artificial Sequence: Synthetic oligonucleotide
atataggcagctctccc

SEQ ID NO: 3091 - DNA, 17 bp, Artificial Sequence
  Description of Artificial Sequence: Synthetic oligonucleotide
catataggcagctctcc

SEQ ID NO: 3092 - DNA, 17 bp, Artificial Sequence
  Description of Artificial Sequence: Synthetic oligonucleotide
ccatataggcagctctc

SEQ ID NO: 3093 - DNA, 17 bp, Artificial Sequence
  Description of Artificial Sequence: Synthetic oligonucleotide
tccatataggcagctct

SEQ ID NO: 3094 - DNA, 17 bp, Artificial Sequence
  Description of Artificial Sequence: Synthetic oligonucleotide
ttccatataggcagctc

SEQ ID NO: 3095 - DNA, 17 bp, Artificial Sequence
  Description of Artificial Sequence: Synthetic oligonucleotide
cttccatataggcagct

SEQ ID NO: 3096 - DNA, 17 bp, Artificial Sequence
  Description of Artificial Sequence: Synthetic oligonucleotide
tcttccatataggcagc

SEQ ID NO: 3097 - DNA, 17 bp, Artificial Sequence
  Description of Artificial Sequence: Synthetic oligonucleotide
ctcttccatataggcag

SEQ ID NO: 3098 - DNA, 17 bp, Artificial Sequence
  Description of Artificial Sequence: Synthetic oligonucleotide
gctcttccatataggca

SEQ ID NO: 3099 - DNA, 17 bp, Artificial Sequence
  Description of Artificial Sequence: Synthetic oligonucleotide
ggctcttccatataggc

SEQ ID NO: 3100 - DNA, 17 bp, Artificial Sequence
  Description of Artificial Sequence: Synthetic oligonucleotide
gggctcttccatatagg

SEQ ID NO: 3101 - DNA, 17 bp, Artificial Sequence
  Description of Artificial Sequence: Synthetic oligonucleotide
agggctcttccatatag

SEQ ID NO: 3102 - DNA, 17 bp, Artificial Sequence
  Description of Artificial Sequence: Synthetic oligonucleotide
tagggctcttccatata

SEQ ID NO: 3103 - DNA, 17 bp, Artificial Sequence
  Description of Artificial Sequence: Synthetic oligonucleotide
ttagggctcttccatat

SEQ ID NO: 3104 - DNA, 17 bp, Artificial Sequence
  Description of Artificial Sequence: Synthetic oligonucleotide
attagggctcttccata

SEQ ID NO: 3105 - DNA, 17 bp, Artificial Sequence
  Description of Artificial Sequence: Synthetic oligonucleotide
cattagggctcttccat

SEQ ID NO: 3106 - DNA, 17 bp, Artificial Sequence
  Description of Artificial Sequence: Synthetic oligonucleotide
acattagggctcttcca

SEQ ID NO: 3107 - DNA, 17 bp, Artificial Sequence
  Description of Artificial Sequence: Synthetic oligonucleotide
cacattagggctcttcc

SEQ ID NO: 3108 - DNA, 17 bp, Artificial Sequence
  Description of Artificial Sequence: Synthetic oligonucleotide
acacattagggctcttc

SEQ ID NO: 3109 - DNA, 17 bp, Artificial Sequence
  Description of Artificial Sequence: Synthetic oligonucleotide
tacacattagggctctt

SEQ ID NO: 3110 - DNA, 17 bp, Artificial Sequence
  Description of Artificial Sequence: Synthetic oligonucleotide
ttacacattagggctct

SEQ ID NO: 3111 - DNA, 17 bp, Artificial Sequence
  Description of Artificial Sequence: Synthetic oligonucleotide
tttacacattagggctc

SEQ ID NO: 3112 - DNA, 17 bp, Artificial Sequence
  Description of Artificial Sequence: Synthetic oligonucleotide
ttttacacattagggct

SEQ ID NO: 3113 - DNA, 17 bp, Artificial Sequence
  Description of Artificial Sequence: Synthetic oligonucleotide
attttacacattagggc

SEQ ID NO: 3114 - DNA, 17 bp, Artificial Sequence
  Description of Artificial Sequence: Synthetic oligonucleotide
aattttacacattaggg

SEQ ID NO: 3115 - DNA, 17 bp, Artificial Sequence
  Description of Artificial Sequence: Synthetic oligonucleotide
taattttacacattagg

SEQ ID NO: 3116 - DNA, 17 bp, Artificial Sequence
  Description of Artificial Sequence: Synthetic oligonucleotide
ttaattttacacattag

SEQ ID NO: 3117 - DNA, 17 bp, Artificial Sequence
  Description of Artificial Sequence: Synthetic oligonucleotide
attaattttacacatta

SEQ ID NO: 3118 - DNA, 17 bp, Artificial Sequence
  Description of Artificial Sequence: Synthetic oligonucleotide
aattaattttacacatt

SEQ ID NO: 3119 - DNA, 17 bp, Artificial Sequence
  Description of Artificial Sequence: Synthetic oligonucleotide
aaattaattttacacat

SEQ ID NO: 3120 - DNA, 17 bp, Artificial Sequence
  Description of Artificial Sequence: Synthetic oligonucleotide
aaaattaattttacaca

SEQ ID NO: 3121 - DNA, 17 bp, Artificial Sequence
  Description of Artificial Sequence: Synthetic oligonucleotide
taaaattaattttacac

SEQ ID NO: 3122 - DNA, 17 bp, Artificial Sequence
  Description of Artificial Sequence: Synthetic oligonucleotide
ctaaaattaattttaca

SEQ ID NO: 3123 - DNA, 17 bp, Artificial Sequence
  Description of Artificial Sequence: Synthetic oligonucleotide
actaaaattaattttac

SEQ ID NO: 3124 - DNA, 17 bp, Artificial Sequence
  Description of Artificial Sequence: Synthetic oligonucleotide
tactaaaattaatttta

SEQ ID NO: 3125 - DNA, 17 bp, Artificial Sequence
  Description of Artificial Sequence: Synthetic oligonucleotide
ctactaaaattaatttt

SEQ ID NO: 3126 - DNA, 18 bp, Artificial Sequence
  Description of Artificial Sequence: Synthetic oligonucleotide
ggacgaaaccgtaagcag

SEQ ID NO: 3127 - DNA, 18 bp, Artificial Sequence
  Description of Artificial Sequence: Synthetic oligonucleotide
cggacgaaaccgtaagca

SEQ ID NO: 3128 - DNA, 18 bp, Artificial Sequence
  Description of Artificial Sequence: Synthetic oligonucleotide
acggacgaaaccgtaagc

SEQ ID NO: 3129 - DNA, 18 bp, Artificial Sequence
  Description of Artificial Sequence: Synthetic oligonucleotide
cacggacgaaaccgtaag

SEQ ID NO: 3130 - DNA, 18 bp, Artificial Sequence
  Description of Artificial Sequence: Synthetic oligonucleotide
acacggacgaaaccgtaa

SEQ ID NO: 3131 - DNA, 18 bp, Artificial Sequence
  Description of Artificial Sequence: Synthetic oligonucleotide
aacacggacgaaaccgta

SEQ ID NO: 3132 - DNA, 18 bp, Artificial Sequence
  Description of Artificial Sequence: Synthetic oligonucleotide
caacacggacgaaaccgt

SEQ ID NO: 3133 - DNA, 18 bp, Artificial Sequence
  Description of Artificial Sequence: Synthetic oligonucleotide
gcaacacggacgaaaccg

SEQ ID NO: 3134 - DNA, 18 bp, Artificial Sequence
  Description of Artificial Sequence: Synthetic oligonucleotide
tgcaacacggacgaaacc

SEQ ID NO: 3135 - DNA, 18 bp, Artificial Sequence
  Description of Artificial Sequence: Synthetic oligonucleotide
ctgcaacacggacgaaac

SEQ ID NO: 3136 - DNA, 18 bp, Artificial Sequence
  Description of Artificial Sequence: Synthetic oligonucleotide
cacccggacgaaacctag

SEQ ID NO: 3137 - DNA, 18 bp, Artificial Sequence
  Description of Artificial Sequence: Synthetic oligonucleotide
acacccggacgaaaccta

SEQ ID NO: 3138 - DNA, 18 bp, Artificial Sequence
  Description of Artificial Sequence: Synthetic oligonucleotide
cacacccggacgaaacct

SEQ ID NO: 3139 - DNA, 18 bp, Artificial Sequence
  Description of Artificial Sequence: Synthetic oligonucleotide
tcacacccggacgaaacc

SEQ ID NO: 3140 - DNA, 18 bp, Artificial Sequence
  Description of Artificial Sequence: Synthetic oligonucleotide
gtcacacccggacgaaac

SEQ ID NO: 3141 - DNA, 18 bp, Artificial Sequence
  Description of Artificial Sequence: Synthetic oligonucleotide
ggtcacacccggacgaaa

SEQ ID NO: 3142 - DNA, 18 bp, Artificial Sequence
  Description of Artificial Sequence: Synthetic oligonucleotide
cggtcacacccggacgaa

SEQ ID NO: 3143 - DNA, 18 bp, Artificial Sequence
  Description of Artificial Sequence: Synthetic oligonucleotide
tcggtcacacccggacga

SEQ ID NO: 3144 - DNA, 18 bp, Artificial Sequence
  Description of Artificial Sequence: Synthetic oligonucleotide
ttcggtcacacccggacg

SEQ ID NO: 3145 - DNA, 18 bp, Artificial Sequence
  Description of Artificial Sequence: Synthetic oligonucleotide
tttcggtcacacccggac

SEQ ID NO: 3146 - DNA, 18 bp, Artificial Sequence
  Description of Artificial Sequence: Synthetic oligonucleotide
ctttcggtcacacccgga

SEQ ID NO: 3147 - DNA, 18 bp, Artificial Sequence
  Description of Artificial Sequence: Synthetic oligonucleotide
cctttcggtcacacccgg

SEQ ID NO: 3148 - DNA, 18 bp, Artificial Sequence
  Description of Artificial Sequence: Synthetic oligonucleotide
acctttcggtcacacccg

SEQ ID NO: 3149 - DNA, 18 bp, Artificial Sequence
  Description of Artificial Sequence: Synthetic oligonucleotide
tacctttcggtcacaccc

SEQ ID NO: 3150 - DNA, 18 bp, Artificial Sequence
  Description of Artificial Sequence: Synthetic oligonucleotide
ttacctttcggtcacacc

SEQ ID NO: 3151 - DNA, 18 bp, Artificial Sequence
  Description of Artificial Sequence: Synthetic oligonucleotide
cttacctttcggtcacac

SEQ ID NO: 3152 - DNA, 18 bp, Artificial Sequence
  Description of Artificial Sequence: Synthetic oligonucleotide
tcttacctttcggtcaca

SEQ ID NO: 3153 - DNA, 18 bp, Artificial Sequence
  Description of Artificial Sequence: Synthetic oligonucleotide
atcttacctttcggtcac

SEQ ID NO: 3154 - DNA, 18 bp, Artificial Sequence
  Description of Artificial Sequence: Synthetic oligonucleotide
catcttacctttcggtca

SEQ ID NO: 3155 - DNA, 18 bp, Artificial Sequence
  Description of Artificial Sequence: Synthetic oligonucleotide
ccatcttacctttcggtc

SEQ ID NO: 3156 - DNA, 18 bp, Artificial Sequence
  Description of Artificial Sequence: Synthetic oligonucleotide
tccatcttacctttcggt

SEQ ID NO: 3157 - DNA, 18 bp, Artificial Sequence
  Description of Artificial Sequence: Synthetic oligonucleotide
ctccatcttacctttcgg

SEQ ID NO: 3158 - DNA, 18 bp, Artificial Sequence
  Description of Artificial Sequence: Synthetic oligonucleotide
tctccatcttacctttcg

SEQ ID NO: 3159 - DNA, 18 bp, Artificial Sequence
  Description of Artificial Sequence: Synthetic oligonucleotide
ctctccatcttacctttc

SEQ ID NO: 3160 - DNA, 18 bp, Artificial Sequence
  Description of Artificial Sequence: Synthetic oligonucleotide
gctctccatcttaccttt

SEQ ID NO: 3161 - DNA, 18 bp, Artificial Sequence
  Description of Artificial Sequence: Synthetic oligonucleotide
ggctctccatcttacctt

SEQ ID NO: 3162 - DNA, 18 bp, Artificial Sequence
  Description of Artificial Sequence: Synthetic oligonucleotide
aggctctccatcttacct

SEQ ID NO: 3163 - DNA, 18 bp, Artificial Sequence
  Description of Artificial Sequence: Synthetic oligonucleotide
aaggctctccatcttacc

SEQ ID NO: 3164 - DNA, 18 bp, Artificial Sequence
  Description of Artificial Sequence: Synthetic oligonucleotide
caaggctctccatcttac

SEQ ID NO: 3165 - DNA, 18 bp, Artificial Sequence
  Description of Artificial Sequence: Synthetic oligonucleotide
acaaggctctccatctta

SEQ ID NO: 3166 - DNA, 18 bp, Artificial Sequence
  Description of Artificial Sequence: Synthetic oligonucleotide
cgtgtgttttctcgttga

SEQ ID NO: 3167 - DNA, 18 bp, Artificial Sequence
  Description of Artificial Sequence: Synthetic oligonucleotide
acgtgtgttttctcgttg

SEQ ID NO: 3168 - DNA, 18 bp, Artificial Sequence
  Description of Artificial Sequence: Synthetic oligonucleotide
gacgtgtgttttctcgtt

SEQ ID NO: 3169 - DNA, 18 bp, Artificial Sequence
  Description of Artificial Sequence: Synthetic oligonucleotide
ggacgtgtgttttctcgt

SEQ ID NO: 3170 - DNA, 18 bp, Artificial Sequence
  Description of Artificial Sequence: Synthetic oligonucleotide
tggacgtgtgttttctcg

SEQ ID NO: 3171 - DNA, 18 bp, Artificial Sequence
  Description of Artificial Sequence: Synthetic oligonucleotide
ttggacgtgtgttttctc

SEQ ID NO: 3172 - DNA, 18 bp, Artificial Sequence
  Description of Artificial Sequence: Synthetic oligonucleotide
gttggacgtgtgttttct

SEQ ID NO: 3173 - DNA, 18 bp, Artificial Sequence
  Description of Artificial Sequence: Synthetic oligonucleotide
agttggacgtgtgttttc

SEQ ID NO: 3174 - DNA, 18 bp, Artificial Sequence
  Description of Artificial Sequence: Synthetic oligonucleotide
gagttggacgtgtgtttt

SEQ ID NO: 3175 - DNA, 18 bp, Artificial Sequence
  Description of Artificial Sequence: Synthetic oligonucleotide
tgagttggacgtgtgttt

SEQ ID NO: 3176 - DNA, 18 bp, Artificial Sequence
  Description of Artificial Sequence: Synthetic oligonucleotide
ctgagttggacgtgtgtt

SEQ ID NO: 3177 - DNA, 18 bp, Artificial Sequence
  Description of Artificial Sequence: Synthetic oligonucleotide
actgagttggacgtgtgt

SEQ ID NO: 3178 - DNA, 18 bp, Artificial Sequence
  Description of Artificial Sequence: Synthetic oligonucleotide
aactgagttggacgtgtg

SEQ ID NO: 3179 - DNA, 18 bp, Artificial Sequence
  Description of Artificial Sequence: Synthetic oligonucleotide
aaactgagttggacgtgt

SEQ ID NO: 3180 - DNA, 18 bp, Artificial Sequence
  Description of Artificial Sequence: Synthetic oligonucleotide
caaactgagttggacgtg

SEQ ID NO: 3181 - DNA, 18 bp, Artificial Sequence
  Description of Artificial Sequence: Synthetic oligonucleotide
gcaaactgagttggacgt

SEQ ID NO: 3182 - DNA, 18 bp, Artificial Sequence
  Description of Artificial Sequence: Synthetic oligonucleotide
ggcaaactgagttggacg

SEQ ID NO: 3183 - DNA, 18 bp, Artificial Sequence
  Description of Artificial Sequence: Synthetic oligonucleotide
aggcaaactgagttggac

SEQ ID NO: 3184 - DNA, 18 bp, Artificial Sequence
  Description of Artificial Sequence: Synthetic oligonucleotide
caggcaaactgagttgga

SEQ ID NO: 3185 - DNA, 18 bp, Artificial Sequence
  Description of Artificial Sequence: Synthetic oligonucleotide
acaggcaaactgagttgg

SEQ ID NO: 3186 - DNA, 18 bp, Artificial Sequence
  Description of Artificial Sequence: Synthetic oligonucleotide
cacatagggctgttcaag

SEQ ID NO: 3187 - DNA, 18 bp, Artificial Sequence
  Description of Artificial Sequence: Synthetic oligonucleotide
acacatagggctgttcaa

SEQ ID NO: 3188 - DNA, 18 bp, Artificial Sequence
  Description of Artificial Sequence: Synthetic oligonucleotide
aacacatagggctgttca

SEQ ID NO: 3189 - DNA, 18 bp, Artificial Sequence
  Description of Artificial Sequence: Synthetic oligonucleotide
gaacacatagggctgttc

SEQ ID NO: 3190 - DNA, 18 bp, Artificial Sequence
  Description of Artificial Sequence: Synthetic oligonucleotide
tgaacacatagggctgtt

SEQ ID NO: 3191 - DNA, 18 bp, Artificial Sequence
  Description of Artificial Sequence: Synthetic oligonucleotide
atgaacacatagggctgt

SEQ ID NO: 3192 - DNA, 18 bp, Artificial Sequence
  Description of Artificial Sequence: Synthetic oligonucleotide
gttcttacgaagaagaac

SEQ ID NO: 3193 - DNA, 18 bp, Artificial Sequence
  Description of Artificial Sequence: Synthetic oligonucleotide
cgttcttacgaagaagaa

SEQ ID NO: 3194 - DNA, 18 bp, Artificial Sequence
  Description of Artificial Sequence: Synthetic oligonucleotide
ccgttcttacgaagaaga

SEQ ID NO: 3195 - DNA, 18 bp, Artificial Sequence
  Description of Artificial Sequence: Synthetic oligonucleotide
accgttcttacgaagaag

SEQ ID NO: 3196 - DNA, 18 bp, Artificial Sequence
  Description of Artificial Sequence: Synthetic oligonucleotide
taccgttcttacgaagaa

SEQ ID NO: 3197 - DNA, 18 bp, Artificial Sequence
  Description of Artificial Sequence: Synthetic oligonucleotide
ttaccgttcttacgaaga

SEQ ID NO: 3198 - DNA, 18 bp, Artificial Sequence
  Description of Artificial Sequence: Synthetic oligonucleotide
attaccgttcttacgaag

SEQ ID NO: 3199 - DNA, 18 bp, Artificial Sequence
  Description of Artificial Sequence: Synthetic oligonucleotide
tattaccgttcttacgaa

SEQ ID NO: 3200 - DNA, 18 bp, Artificial Sequence
  Description of Artificial Sequence: Synthetic oligonucleotide
ttattaccgttcttacga

SEQ ID NO: 3201 - DNA, 18 bp, Artificial Sequence
  Description of Artificial Sequence: Synthetic oligonucleotide
atcagtgccaagctcgtc

SEQ ID NO: 3202 - DNA, 18 bp, Artificial Sequence
  Description of Artificial Sequence: Synthetic oligonucleotide
gatcagtgccaagctcgt

SEQ ID NO: 3203 - DNA, 18 bp, Artificial Sequence
  Description of Artificial Sequence: Synthetic oligonucleotide
ggatcagtgccaagctcg

SEQ ID NO: 3204 - DNA, 18 bp, Artificial Sequence
  Description of Artificial Sequence: Synthetic oligonucleotide
gtaagttttaaataacca

SEQ ID NO: 3205 - DNA, 18 bp, Artificial Sequence
  Description of Artificial Sequence: Synthetic oligonucleotide
agtaagttttaaataacc

SEQ ID NO: 3206 - DNA, 18 bp, Artificial Sequence
  Description of Artificial Sequence: Synthetic oligonucleotide
cagtaagttttaaataac

SEQ ID NO: 3207 - DNA, 18 bp, Artificial Sequence
  Description of Artificial Sequence: Synthetic oligonucleotide
tcagtaagttttaaataa

SEQ ID NO: 3208 - DNA, 18 bp, Artificial Sequence
  Description of Artificial Sequence: Synthetic oligonucleotide
gtcagtaagttttaaata

SEQ ID NO: 3209 - DNA, 18 bp, Artificial Sequence
  Description of Artificial Sequence: Synthetic oligonucleotide
tgtcagtaagttttaaat

SEQ ID NO: 3210 - DNA, 18 bp, Artificial Sequence
  Description of Artificial Sequence: Synthetic oligonucleotide
ttgtcagtaagttttaaa

SEQ ID NO: 3211 - DNA, 18 bp, Artificial Sequence
  Description of Artificial Sequence: Synthetic oligonucleotide
attgtcagtaagttttaa

SEQ ID NO: 3212 - DNA, 18 bp, Artificial Sequence
  Description of Artificial Sequence: Synthetic oligonucleotide
cattgtcagtaagtttta

SEQ ID NO: 3213 - DNA, 18 bp, Artificial Sequence
  Description of Artificial Sequence: Synthetic oligonucleotide
acattgtcagtaagtttt

SEQ ID NO: 3214 - DNA, 18 bp, Artificial Sequence
  Description of Artificial Sequence: Synthetic oligonucleotide
tgcacaaaagttagcagc

SEQ ID NO: 3215 - DNA, 18 bp, Artificial Sequence
  Description of Artificial Sequence: Synthetic oligonucleotide
gtgcacaaaagttagcag

SEQ ID NO: 3216 - DNA, 18 bp, Artificial Sequence
  Description of Artificial Sequence: Synthetic oligonucleotide
agtgcacaaaagttagca

SEQ ID NO: 3217 - DNA, 18 bp, Artificial Sequence
  Description of Artificial Sequence: Synthetic oligonucleotide
tccactacttcttcagag

SEQ ID NO: 3218 - DNA, 18 bp, Artificial Sequence
  Description of Artificial Sequence: Synthetic oligonucleotide
ttccactacttcttcaga

SEQ ID NO: 3219 - DNA, 18 bp, Artificial Sequence
  Description of Artificial Sequence: Synthetic oligonucleotide
tttccactacttcttcag

SEQ ID NO: 3220 - DNA, 18 bp, Artificial Sequence
  Description of Artificial Sequence: Synthetic oligonucleotide
ttttccactacttcttca

SEQ ID NO: 3221 - DNA, 18 bp, Artificial Sequence
  Description of Artificial Sequence: Synthetic oligonucleotide
attttccactacttcttc

SEQ ID NO: 3222 - DNA, 18 bp, Artificial Sequence
  Description of Artificial Sequence: Synthetic oligonucleotide
gattttccactacttctt

SEQ ID NO: 3223 - DNA, 18 bp, Artificial Sequence
  Description of Artificial Sequence: Synthetic oligonucleotide
ggattttccactacttct

SEQ ID NO: 3224 - DNA, 18 bp, Artificial Sequence
  Description of Artificial Sequence: Synthetic oligonucleotide
aggattttccactacttc

SEQ ID NO: 3225 - DNA, 18 bp, Artificial Sequence
  Description of Artificial Sequence: Synthetic oligonucleotide
taggattttccactactt

SEQ ID NO: 3226 - DNA, 18 bp, Artificial Sequence
  Description of Artificial Sequence: Synthetic oligonucleotide
gtaggattttccactact

SEQ ID NO: 3227 - DNA, 18 bp, Artificial Sequence
  Description of Artificial Sequence: Synthetic oligonucleotide
ggtaggattttccactac

SEQ ID NO: 3228 - DNA, 18 bp, Artificial Sequence
  Description of Artificial Sequence: Synthetic oligonucleotide
aacttcggtagttttcac

SEQ ID NO: 3229 - DNA, 18 bp, Artificial Sequence
  Description of Artificial Sequence: Synthetic oligonucleotide
caacttcggtagttttca

SEQ ID NO: 3230 - DNA, 18 bp, Artificial Sequence
  Description of Artificial Sequence: Synthetic oligonucleotide
acaacttcggtagttttc

SEQ ID NO: 3231 - DNA, 18 bp, Artificial Sequence
  Description of Artificial Sequence: Synthetic oligonucleotide
tacaacttcggtagtttt

SEQ ID NO: 3232 - DNA, 18 bp, Artificial Sequence
  Description of Artificial Sequence: Synthetic oligonucleotide
ctacaacttcggtagttt

SEQ ID NO: 3233 - DNA, 18 bp, Artificial Sequence
  Description of Artificial Sequence: Synthetic oligonucleotide
cctacaacttcggtagtt

SEQ ID NO: 3234 - DNA, 18 bp, Artificial Sequence
  Description of Artificial Sequence: Synthetic oligonucleotide
attaacaatagttgtaca

SEQ ID NO: 3235 - DNA, 18 bp, Artificial Sequence
  Description of Artificial Sequence: Synthetic oligonucleotide
cattaacaatagttgtac

SEQ ID NO: 3236 - DNA, 18 bp, Artificial Sequence
  Description of Artificial Sequence: Synthetic oligonucleotide
ccattaacaatagttgta

SEQ ID NO: 3237 - DNA, 18 bp, Artificial Sequence
  Description of Artificial Sequence: Synthetic oligonucleotide
atgtcacgagtgacacca

SEQ ID NO: 3238 - DNA, 18 bp, Artificial Sequence
  Description of Artificial Sequence: Synthetic oligonucleotide
atgtcaagtacaagtaaa

SEQ ID NO: 3239 - DNA, 18 bp, Artificial Sequence
  Description of Artificial Sequence: Synthetic oligonucleotide
aatgtcaagtacaagtaa

SEQ ID NO: 3240 - DNA, 18 bp, Artificial Sequence
  Description of Artificial Sequence: Synthetic oligonucleotide
accaacactaccacatga

SEQ ID NO: 3241 - DNA, 18 bp, Artificial Sequence
  Description of Artificial Sequence: Synthetic oligonucleotide
aaccaacactaccacatg

SEQ ID NO: 3242 - DNA, 18 bp, Artificial Sequence
  Description of Artificial Sequence: Synthetic oligonucleotide
aaaccaacactaccacat

SEQ ID NO: 3243 - DNA, 18 bp, Artificial Sequence
  Description of Artificial Sequence: Synthetic oligonucleotide
aaaaccaacactaccaca

SEQ ID NO: 3244 - DNA, 18 bp, Artificial Sequence
  Description of Artificial Sequence: Synthetic oligonucleotide
taaaaccaacactaccac

SEQ ID NO: 3245 - DNA, 18 bp, Artificial Sequence
  Description of Artificial Sequence: Synthetic oligonucleotide
ttaaaaccaacactacca

SEQ ID NO: 3246 - DNA, 18 bp, Artificial Sequence
  Description of Artificial Sequence: Synthetic oligonucleotide
gttaaaaccaacactacc

SEQ ID NO: 3247 - DNA, 18 bp, Artificial Sequence
  Description of Artificial Sequence: Synthetic oligonucleotide
tgttaaaaccaacactac

SEQ ID NO: 3248 - DNA, 18 bp, Artificial Sequence
  Description of Artificial Sequence: Synthetic oligonucleotide
atgttaaaaccaacacta

SEQ ID NO: 3249 - DNA, 18 bp, Artificial Sequence
  Description of Artificial Sequence: Synthetic oligonucleotide
gcctaagaaacaataaac

SEQ ID NO: 3250 - DNA, 18 bp, Artificial Sequence
  Description of Artificial Sequence: Synthetic oligonucleotide
agcctaagaaacaataaa

SEQ ID NO: 3251 - DNA, 18 bp, Artificial Sequence
  Description of Artificial Sequence: Synthetic oligonucleotide
tagcctaagaaacaataa

SEQ ID NO: 3252 - DNA, 18 bp, Artificial Sequence
  Description of Artificial Sequence: Synthetic oligonucleotide
atagcctaagaaacaata

SEQ ID NO: 3253 - DNA, 18 bp, Artificial Sequence
  Description of Artificial Sequence: Synthetic oligonucleotide
aatagcctaagaaacaat

SEQ ID NO: 3254 - DNA, 18 bp, Artificial Sequence
  Description of Artificial Sequence: Synthetic oligonucleotide
cattttagactgtacagt

SEQ ID NO: 3255 - DNA, 18 bp, Artificial Sequence
  Description of Artificial Sequence: Synthetic oligonucleotide
acattttagactgtacag

SEQ ID NO: 3256 - DNA, 18 bp, Artificial Sequence
  Description of Artificial Sequence: Synthetic oligonucleotide
gacattttagactgtaca

SEQ ID NO: 3257 - DNA, 18 bp, Artificial Sequence
  Description of Artificial Sequence: Synthetic oligonucleotide
tacagcaccctgcatgga

SEQ ID NO: 3258 - DNA, 18 bp, Artificial Sequence
  Description of Artificial Sequence: Synthetic oligonucleotide
ctacagcaccctgcatgg

SEQ ID NO: 3259 - DNA, 18 bp, Artificial Sequence
  Description of Artificial Sequence: Synthetic oligonucleotide
tctacagcaccctgcatg

SEQ ID NO: 3260 - DNA, 18 bp, Artificial Sequence
  Description of Artificial Sequence: Synthetic oligonucleotide
gtctacagcaccctgcat

SEQ ID NO: 3261 - DNA, 18 bp, Artificial Sequence
  Description of Artificial Sequence: Synthetic oligonucleotide
tgtctacagcaccctgca

SEQ ID NO: 3262 - DNA, 18 bp, Artificial Sequence
  Description of Artificial Sequence: Synthetic oligonucleotide
atgtctacagcaccctgc

SEQ ID NO: 3263 - DNA, 18 bp, Artificial Sequence
  Description of Artificial Sequence: Synthetic oligonucleotide
tttagccacattcaaaga

SEQ ID NO: 3264 - DNA, 18 bp, Artificial Sequence
  Description of Artificial Sequence: Synthetic oligonucleotide
atttagccacattcaaag

SEQ ID NO: 3265 - DNA, 18 bp, Artificial Sequence
  Description of Artificial Sequence: Synthetic oligonucleotide
gatttagccacattcaaa

SEQ ID NO: 3266 - DNA, 18 bp, Artificial Sequence
  Description of Artificial Sequence: Synthetic oligonucleotide
agatttagccacattcaa

SEQ ID NO: 3267 - DNA, 18 bp, Artificial Sequence
  Description of Artificial Sequence: Synthetic oligonucleotide
cagatttagccacattca

SEQ ID NO: 3268 - DNA, 18 bp, Artificial Sequence
  Description of Artificial Sequence: Synthetic oligonucleotide
tcagatttagccacattc

SEQ ID NO: 3269 - DNA, 18 bp, Artificial Sequence
  Description of Artificial Sequence: Synthetic oligonucleotide
attgttgataatgttgtt

SEQ ID NO: 3270 - DNA, 18 bp, Artificial Sequence
  Description of Artificial Sequence: Synthetic oligonucleotide
cattgttgataatgttgt

SEQ ID NO: 3271 - DNA, 18 bp, Artificial Sequence
  Description of Artificial Sequence: Synthetic oligonucleotide
gcattgttgataatgttg

SEQ ID NO: 3272 - DNA, 18 bp, Artificial Sequence
  Description of Artificial Sequence: Synthetic oligonucleotide
agggaatctagcccattt

SEQ ID NO: 3273 - DNA, 18 bp, Artificial Sequence
  Description of Artificial Sequence: Synthetic oligonucleotide
tagggaatctagcccatt

SEQ ID NO: 3274 - DNA, 18 bp, Artificial Sequence
  Description of Artificial Sequence: Synthetic oligonucleotide
ttagggaatctagcccat

SEQ ID NO: 3275 - DNA, 18 bp, Artificial Sequence
  Description of Artificial Sequence: Synthetic oligonucleotide
cttagggaatctagccca

SEQ ID NO: 3276 - DNA, 18 bp, Artificial Sequence
  Description of Artificial Sequence: Synthetic oligonucleotide
tcttagggaatctagccc

SEQ ID NO: 3277 - DNA, 18 bp, Artificial Sequence
  Description of Artificial Sequence: Synthetic oligonucleotide
ctcttagggaatctagcc

SEQ ID NO: 3278 - DNA, 18 bp, Artificial Sequence
  Description of Artificial Sequence: Synthetic oligonucleotide
actcttagggaatctagc

SEQ ID NO: 3279 - DNA, 18 bp, Artificial Sequence
  Description of Artificial Sequence: Synthetic oligonucleotide
cactcttagggaatctag

SEQ ID NO: 3280 - DNA, 18 bp, Artificial Sequence
  Description of Artificial Sequence: Synthetic oligonucleotide
tcactcttagggaatcta

SEQ ID NO: 3281 - DNA, 18 bp, Artificial Sequence
  Description of Artificial Sequence: Synthetic oligonucleotide
atcactcttagggaatct

SEQ ID NO: 3282 - DNA, 18 bp, Artificial Sequence
  Description of Artificial Sequence: Synthetic oligonucleotide
catcactcttagggaatc

SEQ ID NO: 3283 - DNA, 18 bp, Artificial Sequence
  Description of Artificial Sequence: Synthetic oligonucleotide
ccatcactcttagggaat

SEQ ID NO: 3284 - DNA, 18 bp, Artificial Sequence
  Description of Artificial Sequence: Synthetic oligonucleotide
aaggtggttccagttctg

SEQ ID NO: 3285 - DNA, 18 bp, Artificial Sequence
  Description of Artificial Sequence: Synthetic oligonucleotide
caaggtggttccagttct

SEQ ID NO: 3286 - DNA, 18 bp, Artificial Sequence
  Description of Artificial Sequence: Synthetic oligonucleotide
acaaggtggttccagttc

SEQ ID NO: 3287 - DNA, 18 bp, Artificial Sequence
  Description of Artificial Sequence: Synthetic oligonucleotide
tacaaggtggttccagtt

SEQ ID NO: 3288 - DNA, 18 bp, Artificial Sequence
  Description of Artificial Sequence: Synthetic oligonucleotide
ctacaaggtggttccagt

SEQ ID NO: 3289 - DNA, 18 bp, Artificial Sequence
  Description of Artificial Sequence: Synthetic oligonucleotide
cctacaaggtggttccag

SEQ ID NO: 3290 - DNA, 18 bp, Artificial Sequence
  Description of Artificial Sequence: Synthetic oligonucleotide
acctacaaggtggttcca

SEQ ID NO: 3291 - DNA, 18 bp, Artificial Sequence
  Description of Artificial Sequence: Synthetic oligonucleotide
aacctacaaggtggttcc

SEQ ID NO: 3292 - DNA, 18 bp, Artificial Sequence
  Description of Artificial Sequence: Synthetic oligonucleotide
aaacctacaaggtggttc

SEQ ID NO: 3293 - DNA, 18 bp, Artificial Sequence
  Description of Artificial Sequence: Synthetic oligonucleotide
caaacctacaaggtggtt

SEQ ID NO: 3294 - DNA, 18 bp, Artificial Sequence
  Description of Artificial Sequence: Synthetic oligonucleotide
acaaacctacaaggtggt

SEQ ID NO: 3295 - DNA, 18 bp, Artificial Sequence
  Description of Artificial Sequence: Synthetic oligonucleotide
aacaaacctacaaggtgg

SEQ ID NO: 3296 - DNA, 18 bp, Artificial Sequence
  Description of Artificial Sequence: Synthetic oligonucleotide
taacaaacctacaaggtg

SEQ ID NO: 3297 - DNA, 18 bp, Artificial Sequence
  Description of Artificial Sequence: Synthetic oligonucleotide
gtaacaaacctacaaggt

SEQ ID NO: 3298 - DNA, 18 bp, Artificial Sequence
  Description of Artificial Sequence: Synthetic oligonucleotide
tgtaacaaacctacaagg

SEQ ID NO: 3299 - DNA, 18 bp, Artificial Sequence
  Description of Artificial Sequence: Synthetic oligonucleotide
ctgtaacaaacctacaag

SEQ ID NO: 3300 - DNA, 18 bp, Artificial Sequence
  Description of Artificial Sequence: Synthetic oligonucleotide
tctgtaacaaacctacaa

SEQ ID NO: 3301 - DNA, 18 bp, Artificial Sequence
  Description of Artificial Sequence: Synthetic oligonucleotide
gtctgtaacaaacctaca

SEQ ID NO: 3302 - DNA, 18 bp, Artificial Sequence
  Description of Artificial Sequence: Synthetic oligonucleotide
tgtctgtaacaaacctac

SEQ ID NO: 3303 - DNA, 18 bp, Artificial Sequence
  Description of Artificial Sequence: Synthetic oligonucleotide
gtgtctgtaacaaaccta

SEQ ID NO: 3304 - DNA, 18 bp, Artificial Sequence
  Description of Artificial Sequence: Synthetic oligonucleotide
tgtgtctgtaacaaacct

SEQ ID NO: 3305 - DNA, 18 bp, Artificial Sequence
  Description of Artificial Sequence: Synthetic oligonucleotide
gtgtgtctgtaacaaacc

SEQ ID NO: 3306 - DNA, 18 bp, Artificial Sequence
  Description of Artificial Sequence: Synthetic oligonucleotide
ggtgtgtctgtaacaaac

SEQ ID NO: 3307 - DNA, 18 bp, Artificial Sequence
  Description of Artificial Sequence: Synthetic oligonucleotide
ctctatttaggttgttta

SEQ ID NO: 3308 - DNA, 18 bp, Artificial Sequence
  Description of Artificial Sequence: Synthetic oligonucleotide
cctctatttaggttgttt

SEQ ID NO: 3309 - DNA, 18 bp, Artificial Sequence
  Description of Artificial Sequence: Synthetic oligonucleotide
acctctatttaggttgtt

SEQ ID NO: 3310 - DNA, 18 bp, Artificial Sequence
  Description of Artificial Sequence: Synthetic oligonucleotide
tacctctatttaggttgt

SEQ ID NO: 3311 - DNA, 18 bp, Artificial Sequence
  Description of Artificial Sequence: Synthetic oligonucleotide
atacctctatttaggttg

SEQ ID NO: 3312 - DNA, 18 bp, Artificial Sequence
  Description of Artificial Sequence: Synthetic oligonucleotide
catacctctatttaggtt

SEQ ID NO: 3313 - DNA, 18 bp, Artificial Sequence
  Description of Artificial Sequence: Synthetic oligonucleotide
ccatacctctatttaggt

SEQ ID NO: 3314 - DNA, 18 bp, Artificial Sequence
  Description of Artificial Sequence: Synthetic oligonucleotide
accatacctctatttagg

SEQ ID NO: 3315 - DNA, 18 bp, Artificial Sequence
  Description of Artificial Sequence: Synthetic oligonucleotide
gtgtgtacacaacatctt

SEQ ID NO: 3316 - DNA, 18 bp, Artificial Sequence
  Description of Artificial Sequence: Synthetic oligonucleotide
tgtgtgtacacaacatct

SEQ ID NO: 3317 - DNA, 18 bp, Artificial Sequence
  Description of Artificial Sequence: Synthetic oligonucleotide
gtgtgtgtacacaacatc

SEQ ID NO: 3318 - DNA, 18 bp, Artificial Sequence
  Description of Artificial Sequence: Synthetic oligonucleotide
agtgtgtgtacacaacat

SEQ ID NO: 3319 - DNA, 18 bp, Artificial Sequence
  Description of Artificial Sequence: Synthetic oligonucleotide
cagtgtgtgtacacaaca

SEQ ID NO: 3320 - DNA, 18 bp, Artificial Sequence
  Description of Artificial Sequence: Synthetic oligonucleotide
ccagtgtgtgtacacaac

SEQ ID NO: 3321 - DNA, 18 bp, Artificial Sequence
  Description of Artificial Sequence: Synthetic oligonucleotide
accagtgtgtgtacacaa

SEQ ID NO: 3322 - DNA, 18 bp, Artificial Sequence
  Description of Artificial Sequence: Synthetic oligonucleotide
taccagtgtgtgtacaca

SEQ ID NO: 3323 - DNA, 18 bp, Artificial Sequence
  Description of Artificial Sequence: Synthetic oligonucleotide
gtaccagtgtgtgtacac

SEQ ID NO: 3324 - DNA, 18 bp, Artificial Sequence
  Description of Artificial Sequence: Synthetic oligonucleotide
acggtacagactgtgttt

SEQ ID NO: 3325 - DNA, 18 bp, Artificial Sequence
  Description of Artificial Sequence: Synthetic oligonucleotide
gacggtacagactgtgtt

SEQ ID NO: 3326 - DNA, 18 bp, Artificial Sequence
  Description of Artificial Sequence: Synthetic oligonucleotide
agacggtacagactgtgt

SEQ ID NO: 3327 - DNA, 18 bp, Artificial Sequence
  Description of Artificial Sequence: Synthetic oligonucleotide
cagacggtacagactgtg

SEQ ID NO: 3328 - DNA, 18 bp, Artificial Sequence
  Description of Artificial Sequence: Synthetic oligonucleotide
gcagacggtacagactgt

SEQ ID NO: 3329 - DNA, 18 bp, Artificial Sequence
  Description of Artificial Sequence: Synthetic oligonucleotide
cgcagacggtacagactg

SEQ ID NO: 3330 - DNA, 18 bp, Artificial Sequence
  Description of Artificial Sequence: Synthetic oligonucleotide
ccgcagacggtacagact

SEQ ID NO: 3331 - DNA, 18 bp, Artificial Sequence
  Description of Artificial Sequence: Synthetic oligonucleotide
gccataacctttccacat

SEQ ID NO: 3332 - DNA, 18 bp, Artificial Sequence
  Description of Artificial Sequence: Synthetic oligonucleotide
agccataacctttccaca

SEQ ID NO: 3333 - DNA, 18 bp, Artificial Sequence
  Description of Artificial Sequence: Synthetic oligonucleotide
cagccataacctttccac

SEQ ID NO: 3334 - DNA, 18 bp, Artificial Sequence
  Description of Artificial Sequence: Synthetic oligonucleotide
acagccataacctttcca

SEQ ID NO: 3335 - DNA, 18 bp, Artificial Sequence
  Description of Artificial Sequence: Synthetic oligonucleotide
tacagccataacctttcc

SEQ ID NO: 3336 - DNA, 18 bp, Artificial Sequence
  Description of Artificial Sequence: Synthetic oligonucleotide
ctacagccataacctttc

SEQ ID NO: 3337 - DNA, 18 bp, Artificial Sequence
  Description of Artificial Sequence: Synthetic oligonucleotide
actacagccataaccttt

SEQ ID NO: 3338 - DNA, 18 bp, Artificial Sequence
  Description of Artificial Sequence: Synthetic oligonucleotide
aactacagccataacctt

SEQ ID NO: 3339 - DNA, 18 bp, Artificial Sequence
  Description of Artificial Sequence: Synthetic oligonucleotide
caactacagccataacct

SEQ ID NO: 3340 - DNA, 18 bp, Artificial Sequence
  Description of Artificial Sequence: Synthetic oligonucleotide
acaactacagccataacc

SEQ ID NO: 3341 - DNA, 18 bp, Artificial Sequence
  Description of Artificial Sequence: Synthetic oligonucleotide
cacaactacagccataac

SEQ ID NO: 3342 - DNA, 18 bp, Artificial Sequence
  Description of Artificial Sequence: Synthetic oligonucleotide
tcacaactacagccataa

SEQ ID NO: 3343 - DNA, 18 bp, Artificial Sequence
  Description of Artificial Sequence: Synthetic oligonucleotide
caaacccgtttaaaaacg

SEQ ID NO: 3344 - DNA, 18 bp, Artificial Sequence
  Description of Artificial Sequence: Synthetic oligonucleotide
gcaaacccgtttaaaaac

SEQ ID NO: 3345 - DNA, 18 bp, Artificial Sequence
  Description of Artificial Sequence: Synthetic oligonucleotide
cgcaaacccgtttaaaaa

SEQ ID NO: 3346 - DNA, 18 bp, Artificial Sequence
  Description of Artificial Sequence: Synthetic oligonucleotide
ccgcaaacccgtttaaaa

SEQ ID NO: 3347 - DNA, 18 bp, Artificial Sequence
  Description of Artificial Sequence: Synthetic oligonucleotide
accgcaaacccgtttaaa

SEQ ID NO: 3348 - DNA, 18 bp, Artificial Sequence
  Description of Artificial Sequence: Synthetic oligonucleotide
caccgcaaacccgtttaa

SEQ ID NO: 3349 - DNA, 18 bp, Artificial Sequence
  Description of Artificial Sequence: Synthetic oligonucleotide
acaccgcaaacccgttta

SEQ ID NO: 3350 - DNA, 18 bp, Artificial Sequence
  Description of Artificial Sequence: Synthetic oligonucleotide
tacaccgcaaacccgttt

SEQ ID NO: 3351 - DNA, 18 bp, Artificial Sequence
  Description of Artificial Sequence: Synthetic oligonucleotide
ttacaccgcaaacccgtt

SEQ ID NO: 3352 - DNA, 18 bp, Artificial Sequence
  Description of Artificial Sequence: Synthetic oligonucleotide
cttacaccgcaaacccgt

SEQ ID NO: 3353 - DNA, 18 bp, Artificial Sequence
  Description of Artificial Sequence: Synthetic oligonucleotide
acttacaccgcaaacccg

SEQ ID NO: 3354 - DNA, 18 bp, Artificial Sequence
  Description of Artificial Sequence: Synthetic oligonucleotide
cacttacaccgcaaaccc

SEQ ID NO: 3355 - DNA, 18 bp, Artificial Sequence
  Description of Artificial Sequence: Synthetic oligonucleotide
gcacttacaccgcaaacc

SEQ ID NO: 3356 - DNA, 18 bp, Artificial Sequence
  Description of Artificial Sequence: Synthetic oligonucleotide
tgcacttacaccgcaaac

SEQ ID NO: 3357 - DNA, 18 bp, Artificial Sequence
  Description of Artificial Sequence: Synthetic oligonucleotide
ctgcacttacaccgcaaa

SEQ ID NO: 3358 - DNA, 18 bp, Artificial Sequence
  Description of Artificial Sequence: Synthetic oligonucleotide
gctgcacttacaccgcaa

SEQ ID NO: 3359 - DNA, 18 bp, Artificial Sequence
  Description of Artificial Sequence: Synthetic oligonucleotide
ggctgcacttacaccgca

SEQ ID NO: 3360 - DNA, 18 bp, Artificial Sequence
  Description of Artificial Sequence: Synthetic oligonucleotide
gggctgcacttacaccgc

SEQ ID NO: 3361 - DNA, 18 bp, Artificial Sequence
  Description of Artificial Sequence: Synthetic oligonucleotide
cgggctgcacttacaccg

SEQ ID NO: 3362 - DNA, 18 bp, Artificial Sequence
  Description of Artificial Sequence: Synthetic oligonucleotide
acgggctgcacttacacc

SEQ ID NO: 3363 - DNA, 18 bp, Artificial Sequence
  Description of Artificial Sequence: Synthetic oligonucleotide
gacgggctgcacttacac

SEQ ID NO: 3364 - DNA, 18 bp, Artificial Sequence
  Description of Artificial Sequence: Synthetic oligonucleotide
agacgggctgcacttaca

SEQ ID NO: 3365 - DNA, 18 bp, Artificial Sequence
  Description of Artificial Sequence: Synthetic oligonucleotide
aagacgggctgcacttac

SEQ ID NO: 3366 - DNA, 18 bp, Artificial Sequence
  Description of Artificial Sequence: Synthetic oligonucleotide
taagacgggctgcactta

SEQ ID NO: 3367 - DNA, 18 bp, Artificial Sequence
  Description of Artificial Sequence: Synthetic oligonucleotide
gtaagacgggctgcactt

SEQ ID NO: 3368 - DNA, 18 bp, Artificial Sequence
  Description of Artificial Sequence: Synthetic oligonucleotide
tgtaagacgggctgcact

SEQ ID NO: 3369 - DNA, 18 bp, Artificial Sequence
  Description of Artificial Sequence: Synthetic oligonucleotide
gtgtaagacgggctgcac

SEQ ID NO: 3370 - DNA, 18 bp, Artificial Sequence
  Description of Artificial Sequence: Synthetic oligonucleotide
ggtgtaagacgggctgca

SEQ ID NO: 3371 - DNA, 18 bp, Artificial Sequence
  Description of Artificial Sequence: Synthetic oligonucleotide
cggtgtaagacgggctgc

SEQ ID NO: 3372 - DNA, 18 bp, Artificial Sequence
  Description of Artificial Sequence: Synthetic oligonucleotide
acggtgtaagacgggctg

SEQ ID NO: 3373 - DNA, 18 bp, Artificial Sequence
  Description of Artificial Sequence: Synthetic oligonucleotide
cacggtgtaagacgggct

SEQ ID NO: 3374 - DNA, 18 bp, Artificial Sequence
  Description of Artificial Sequence: Synthetic oligonucleotide
gcacggtgtaagacgggc

SEQ ID NO: 3375 - DNA, 18 bp, Artificial Sequence
  Description of Artificial Sequence: Synthetic oligonucleotide
cgcacggtgtaagacggg

SEQ ID NO: 3376 - DNA, 18 bp, Artificial Sequence
  Description of Artificial Sequence: Synthetic oligonucleotide
ccgcacggtgtaagacgg

SEQ ID NO: 3377 - DNA, 18 bp, Artificial Sequence
  Description of Artificial Sequence: Synthetic oligonucleotide
gccgcacggtgtaagacg

SEQ ID NO: 3378 - DNA, 18 bp, Artificial Sequence
  Description of Artificial Sequence: Synthetic oligonucleotide
tgccgcacggtgtaagac

SEQ ID NO: 3379 - DNA, 18 bp, Artificial Sequence
  Description of Artificial Sequence: Synthetic oligonucleotide
gtgccgcacggtgtaaga

SEQ ID NO: 3380 - DNA, 18 bp, Artificial Sequence
  Description of Artificial Sequence: Synthetic oligonucleotide
tgtgccgcacggtgtaag

SEQ ID NO: 3381 - DNA, 18 bp, Artificial Sequence
  Description of Artificial Sequence: Synthetic oligonucleotide
ctgtgccgcacggtgtaa

SEQ ID NO: 3382 - DNA, 18 bp, Artificial Sequence
  Description of Artificial Sequence: Synthetic oligonucleotide
cctgtgccgcacggtgta

SEQ ID NO: 3383 - DNA, 18 bp, Artificial Sequence
  Description of Artificial Sequence: Synthetic oligonucleotide
gcctgtgccgcacggtgt

SEQ ID NO: 3384 - DNA, 18 bp, Artificial Sequence
  Description of Artificial Sequence: Synthetic oligonucleotide
tgcctgtgccgcacggtg

SEQ ID NO: 3385 - DNA, 18 bp, Artificial Sequence
  Description of Artificial Sequence: Synthetic oligonucleotide
gtgcctgtgccgcacggt

SEQ ID NO: 3386 - DNA, 18 bp, Artificial Sequence
  Description of Artificial Sequence: Synthetic oligonucleotide
agtgcctgtgccgcacgg

SEQ ID NO: 3387 - DNA, 18 bp, Artificial Sequence
  Description of Artificial Sequence: Synthetic oligonucleotide
tagtgcctgtgccgcacg

SEQ ID NO: 3388 - DNA, 18 bp, Artificial Sequence
  Description of Artificial Sequence: Synthetic oligonucleotide
ctagtgcctgtgccgcac

SEQ ID NO: 3389 - DNA, 18 bp, Artificial Sequence
  Description of Artificial Sequence: Synthetic oligonucleotide
atgtggtaccatgtcacc

SEQ ID NO: 3390 - DNA, 18 bp, Artificial Sequence
  Description of Artificial Sequence: Synthetic oligonucleotide
tatgtggtaccatgtcac

SEQ ID NO: 3391 - DNA, 18 bp, Artificial Sequence
  Description of Artificial Sequence: Synthetic oligonucleotide
atatgtggtaccatgtca

SEQ ID NO: 3392 - DNA, 18 bp, Artificial Sequence
  Description of Artificial Sequence: Synthetic oligonucleotide
tatatgtggtaccatgtc

SEQ ID NO: 3393 - DNA, 18 bp, Artificial Sequence
  Description of Artificial Sequence: Synthetic oligonucleotide
atatatgtggtaccatgt

SEQ ID NO: 3394 - DNA, 18 bp, Artificial Sequence
  Description of Artificial Sequence: Synthetic oligonucleotide
gatatatgtggtaccatg

SEQ ID NO: 3395 - DNA, 18 bp, Artificial Sequence
  Description of Artificial Sequence: Synthetic oligonucleotide
tgatatatgtggtaccat

SEQ ID NO: 3396 - DNA, 18 bp, Artificial Sequence
  Description of Artificial Sequence: Synthetic oligonucleotide
gtgatatatgtggtacca

SEQ ID NO: 3397 - DNA, 18 bp, Artificial Sequence
  Description of Artificial Sequence: Synthetic oligonucleotide
cgtgatatatgtggtacc

SEQ ID NO: 3398 - DNA, 18 bp, Artificial Sequence
  Description of Artificial Sequence: Synthetic oligonucleotide
acgtgatatatgtggtac

SEQ ID NO: 3399 - DNA, 18 bp, Artificial Sequence
  Description of Artificial Sequence: Synthetic oligonucleotide
gacgtgatatatgtggta

SEQ ID NO: 3400 - DNA, 18 bp, Artificial Sequence
  Description of Artificial Sequence: Synthetic oligonucleotide
tgacgtgatatatgtggt

SEQ ID NO: 3401 - DNA, 18 bp, Artificial Sequence
  Description of Artificial Sequence: Synthetic oligonucleotide
atatttaaaataacggtc

SEQ ID NO: 3402 - DNA, 18 bp, Artificial Sequence
  Description of Artificial Sequence: Synthetic oligonucleotide
aatatttaaaataacggt

SEQ ID NO: 3403 - DNA, 18 bp, Artificial Sequence
  Description of Artificial Sequence: Synthetic oligonucleotide
caatatttaaaataacgg

SEQ ID NO: 3404 - DNA, 18 bp, Artificial Sequence
  Description of Artificial Sequence: Synthetic oligonucleotide
ccaatatttaaaataacg

SEQ ID NO: 3405 - DNA, 18 bp, Artificial Sequence
  Description of Artificial Sequence: Synthetic oligonucleotide
cccaatatttaaaataac

SEQ ID NO: 3406 - DNA, 18 bp, Artificial Sequence
  Description of Artificial Sequence: Synthetic oligonucleotide
tcccaatatttaaaataa

SEQ ID NO: 3407 - DNA, 18 bp, Artificial Sequence
  Description of Artificial Sequence: Synthetic oligonucleotide
tccaaaacttgtaggtgg

SEQ ID NO: 3408 - DNA, 18 bp, Artificial Sequence
  Description of Artificial Sequence: Synthetic oligonucleotide
gtccaaaacttgtaggtg

SEQ ID NO: 3409 - DNA, 18 bp, Artificial Sequence
  Description of Artificial Sequence: Synthetic oligonucleotide
ggtccaaaacttgtaggt

SEQ ID NO: 3410 - DNA, 18 bp, Artificial Sequence
  Description of Artificial Sequence: Synthetic oligonucleotide
tggtccaaaacttgtagg

SEQ ID NO: 3411 - DNA, 18 bp, Artificial Sequence
  Description of Artificial Sequence: Synthetic oligonucleotide
gtggtccaaaacttgtag

SEQ ID NO: 3412 - DNA, 18 bp, Artificial Sequence
  Description of Artificial Sequence: Synthetic oligonucleotide
agtggtccaaaacttgta

SEQ ID NO: 3413 - DNA, 18 bp, Artificial Sequence
  Description of Artificial Sequence: Synthetic oligonucleotide
tagtggtccaaaacttgt

SEQ ID NO: 3414 - DNA, 18 bp, Artificial Sequence
  Description of Artificial Sequence: Synthetic oligonucleotide
ctagtggtccaaaacttg

SEQ ID NO: 3415 - DNA, 18 bp, Artificial Sequence
  Description of Artificial Sequence: Synthetic oligonucleotide
actagtggtccaaaactt

SEQ ID NO: 3416 - DNA, 18 bp, Artificial Sequence
  Description of Artificial Sequence: Synthetic oligonucleotide
tacatcctgattatgtac

SEQ ID NO: 3417 - DNA, 18 bp, Artificial Sequence
  Description of Artificial Sequence: Synthetic oligonucleotide
ttacatcctgattatgta

SEQ ID NO: 3418 - DNA, 18 bp, Artificial Sequence
  Description of Artificial Sequence: Synthetic oligonucleotide
tttacatcctgattatgt

SEQ ID NO: 3419 - DNA, 18 bp, Artificial Sequence
  Description of Artificial Sequence: Synthetic oligonucleotide
gtttacatcctgattatg

SEQ ID NO: 3420 - DNA, 18 bp, Artificial Sequence
  Description of Artificial Sequence: Synthetic oligonucleotide
agtttacatcctgattat

SEQ ID NO: 3421 - DNA, 18 bp, Artificial Sequence
  Description of Artificial Sequence: Synthetic oligonucleotide
aagtttacatcctgatta

SEQ ID NO: 3422 - DNA, 18 bp, Artificial Sequence
  Description of Artificial Sequence: Synthetic oligonucleotide
taagtttacatcctgatt

SEQ ID NO: 3423 - DNA, 18 bp, Artificial Sequence
  Description of Artificial Sequence: Synthetic oligonucleotide
gtaagtttacatcctgat

SEQ ID NO: 3424 - DNA, 18 bp, Artificial Sequence
  Description of Artificial Sequence: Synthetic oligonucleotide
tgtaagtttacatcctga

SEQ ID NO: 3425 - DNA, 18 bp, Artificial Sequence
  Description of Artificial Sequence: Synthetic oligonucleotide
atgtaagtttacatcctg

SEQ ID NO: 3426 - DNA, 18 bp, Artificial Sequence
  Description of Artificial Sequence: Synthetic oligonucleotide
tatgtaagtttacatcct

SEQ ID NO: 3427 - DNA, 18 bp, Artificial Sequence
  Description of Artificial Sequence: Synthetic oligonucleotide
ctatgtaagtttacatcc

SEQ ID NO: 3428 - DNA, 18 bp, Artificial Sequence
  Description of Artificial Sequence: Synthetic oligonucleotide
gctatgtaagtttacatc

SEQ ID NO: 3429 - DNA, 18 bp, Artificial Sequence
  Description of Artificial Sequence: Synthetic oligonucleotide
agctatgtaagtttacat

SEQ ID NO: 3430 - DNA, 18 bp, Artificial Sequence
  Description of Artificial Sequence: Synthetic oligonucleotide
gagctatgtaagtttaca

SEQ ID NO: 3431 - DNA, 18 bp, Artificial Sequence
  Description of Artificial Sequence: Synthetic oligonucleotide
tgcagctactgaaaagca

SEQ ID NO: 3432 - DNA, 18 bp, Artificial Sequence
  Description of Artificial Sequence: Synthetic oligonucleotide
gtgcagctactgaaaagc

SEQ ID NO: 3433 - DNA, 18 bp, Artificial Sequence
  Description of Artificial Sequence: Synthetic oligonucleotide
agtgcagctactgaaaag

SEQ ID NO: 3434 - DNA, 18 bp, Artificial Sequence
  Description of Artificial Sequence: Synthetic oligonucleotide
agtttgaaaagcaacatt

SEQ ID NO: 3435 - DNA, 18 bp, Artificial Sequence
  Description of Artificial Sequence: Synthetic oligonucleotide
cagtttgaaaagcaacat

SEQ ID NO: 3436 - DNA, 18 bp, Artificial Sequence
  Description of Artificial Sequence: Synthetic oligonucleotide
acagtttgaaaagcaaca

SEQ ID NO: 3437 - DNA, 18 bp, Artificial Sequence
  Description of Artificial Sequence: Synthetic oligonucleotide
gacagtttgaaaagcaac

SEQ ID NO: 3438 - DNA, 18 bp, Artificial Sequence
  Description of Artificial Sequence: Synthetic oligonucleotide
tgacagtttgaaaagcaa

SEQ ID NO: 3439 - DNA, 18 bp, Artificial Sequence
  Description of Artificial Sequence: Synthetic oligonucleotide
ttgacagtttgaaaagca

SEQ ID NO: 3440 - DNA, 18 bp, Artificial Sequence
  Description of Artificial Sequence: Synthetic oligonucleotide
tttgacagtttgaaaagc

SEQ ID NO: 3441 - DNA, 18 bp, Artificial Sequence
  Description of Artificial Sequence: Synthetic oligonucleotide
gtttgacagtttgaaaag

SEQ ID NO: 3442 - DNA, 18 bp, Artificial Sequence
  Description of Artificial Sequence: Synthetic oligonucleotide
ggtttgacagtttgaaaa

SEQ ID NO: 3443 - DNA, 18 bp, Artificial Sequence
  Description of Artificial Sequence: Synthetic oligonucleotide
gggtttgacagtttgaaa

SEQ ID NO: 3444 - DNA, 18 bp, Artificial Sequence
  Description of Artificial Sequence: Synthetic oligonucleotide
cgggtttgacagtttgaa

SEQ ID NO: 3445 - DNA, 18 bp, Artificial Sequence
  Description of Artificial Sequence: Synthetic oligonucleotide
ccgggtttgacagtttga

SEQ ID NO: 3446 - DNA, 18 bp, Artificial Sequence
  Description of Artificial Sequence: Synthetic oligonucleotide
accgggtttgacagtttg

SEQ ID NO: 3447 - DNA, 18 bp, Artificial Sequence
  Description of Artificial Sequence: Synthetic oligonucleotide
taccgggtttgacagttt

SEQ ID NO: 3448 - DNA, 18 bp, Artificial Sequence
  Description of Artificial Sequence: Synthetic oligonucleotide
ttaccgggtttgacagtt

SEQ ID NO: 3449 - DNA, 18 bp, Artificial Sequence
  Description of Artificial Sequence: Synthetic oligonucleotide
attaccgggtttgacagt

SEQ ID NO: 3450 - DNA, 18 bp, Artificial Sequence
  Description of Artificial Sequence: Synthetic oligonucleotide
aattaccgggtttgacag

SEQ ID NO: 3451 - DNA, 18 bp, Artificial Sequence
  Description of Artificial Sequence: Synthetic oligonucleotide
aaattaccgggtttgaca

SEQ ID NO: 3452 - DNA, 18 bp, Artificial Sequence
  Description of Artificial Sequence: Synthetic oligonucleotide
aaaattaccgggtttgac

SEQ ID NO: 3453 - DNA, 18 bp, Artificial Sequence
  Description of Artificial Sequence: Synthetic oligonucleotide
taaaattaccgggtttga

SEQ ID NO: 3454 - DNA, 18 bp, Artificial Sequence
  Description of Artificial Sequence: Synthetic oligonucleotide
ttaaaattaccgggtttg

SEQ ID NO: 3455 - DNA, 18 bp, Artificial Sequence
  Description of Artificial Sequence: Synthetic oligonucleotide
agacacagcaaagtcata

SEQ ID NO: 3456 - DNA, 18 bp, Artificial Sequence
  Description of Artificial Sequence: Synthetic oligonucleotide
tagacacagcaaagtcat

SEQ ID NO: 3457 - DNA, 18 bp, Artificial Sequence
  Description of Artificial Sequence: Synthetic oligonucleotide
ttagacacagcaaagtca

SEQ ID NO: 3458 - DNA, 18 bp, Artificial Sequence
  Description of Artificial Sequence: Synthetic oligonucleotide
acttccttccttaaagaa

SEQ ID NO: 3459 - DNA, 18 bp, Artificial Sequence
  Description of Artificial Sequence: Synthetic oligonucleotide
aacttccttccttaaaga

SEQ ID NO: 3460 - DNA, 18 bp, Artificial Sequence
  Description of Artificial Sequence: Synthetic oligonucleotide
gaacttccttccttaaag

SEQ ID NO: 3461 - DNA, 18 bp, Artificial Sequence
  Description of Artificial Sequence: Synthetic oligonucleotide
agaacttccttccttaaa

SEQ ID NO: 3462 - DNA, 18 bp, Artificial Sequence
  Description of Artificial Sequence: Synthetic oligonucleotide
cagaacttccttccttaa

SEQ ID NO: 3463 - DNA, 18 bp, Artificial Sequence
  Description of Artificial Sequence: Synthetic oligonucleotide
acagaacttccttcctta

SEQ ID NO: 3464 - DNA, 18 bp, Artificial Sequence
  Description of Artificial Sequence: Synthetic oligonucleotide
aacagaacttccttcctt

SEQ ID NO: 3465 - DNA, 18 bp, Artificial Sequence
  Description of Artificial Sequence: Synthetic oligonucleotide
caacagaacttccttcct

SEQ ID NO: 3466 - DNA, 18 bp, Artificial Sequence
  Description of Artificial Sequence: Synthetic oligonucleotide
tcaacagaacttccttcc

SEQ ID NO: 3467 - DNA, 18 bp, Artificial Sequence
  Description of Artificial Sequence: Synthetic oligonucleotide
ttcaacagaacttccttc

SEQ ID NO: 3468 - DNA, 18 bp, Artificial Sequence
  Description of Artificial Sequence: Synthetic oligonucleotide
caaagaagaagtgtttta

SEQ ID NO: 3469 - DNA, 18 bp, Artificial Sequence
  Description of Artificial Sequence: Synthetic oligonucleotide
gcaaagaagaagtgtttt

SEQ ID NO: 3470 - DNA, 18 bp, Artificial Sequence
  Description of Artificial Sequence: Synthetic oligonucleotide
agcaaagaagaagtgttt

SEQ ID NO: 3471 - DNA, 18 bp, Artificial Sequence
  Description of Artificial Sequence: Synthetic oligonucleotide
gagcaaagaagaagtgtt

SEQ ID NO: 3472 - DNA, 18 bp, Artificial Sequence
  Description of Artificial Sequence: Synthetic oligonucleotide
tgagcaaagaagaagtgt

SEQ ID NO: 3473 - DNA, 18 bp, Artificial Sequence
  Description of Artificial Sequence: Synthetic oligonucleotide
ctgagcaaagaagaagtg

SEQ ID NO: 3474 - DNA, 18 bp, Artificial Sequence
  Description of Artificial Sequence: Synthetic oligonucleotide
cctgagcaaagaagaagt

SEQ ID NO: 3475 - DNA, 18 bp, Artificial Sequence
  Description of Artificial Sequence: Synthetic oligonucleotide
tcctgagcaaagaagaag

SEQ ID NO: 3476 - DNA, 18 bp, Artificial Sequence
  Description of Artificial Sequence: Synthetic oligonucleotide
atcctgagcaaagaagaa

SEQ ID NO: 3477 - DNA, 18 bp, Artificial Sequence
  Description of Artificial Sequence: Synthetic oligonucleotide
catcctgagcaaagaaga

SEQ ID NO: 3478 - DNA, 18 bp, Artificial Sequence
  Description of Artificial Sequence: Synthetic oligonucleotide
ccatcctgagcaaagaag

SEQ ID NO: 3479 - DNA, 18 bp, Artificial Sequence
  Description of Artificial Sequence: Synthetic oligonucleotide
gatatcacacattgttgg

SEQ ID NO: 3480 - DNA, 18 bp, Artificial Sequence
  Description of Artificial Sequence: Synthetic oligonucleotide
tgatatcacacattgttg

SEQ ID NO: 3481 - DNA, 18 bp, Artificial Sequence
  Description of Artificial Sequence: Synthetic oligonucleotide
ctgatatcacacattgtt

SEQ ID NO: 3482 - DNA, 18 bp, Artificial Sequence
  Description of Artificial Sequence: Synthetic oligonucleotide
tctgatatcacacattgt

SEQ ID NO: 3483 - DNA, 18 bp, Artificial Sequence
  Description of Artificial Sequence: Synthetic oligonucleotide
gtctgatatcacacattg

SEQ ID NO: 3484 - DNA, 18 bp, Artificial Sequence
  Description of Artificial Sequence: Synthetic oligonucleotide
tgtctgatatcacacatt

SEQ ID NO: 3485 - DNA, 18 bp, Artificial Sequence
  Description of Artificial Sequence: Synthetic oligonucleotide
ttgtctgatatcacacat

SEQ ID NO: 3486 - DNA, 18 bp, Artificial Sequence
  Description of Artificial Sequence: Synthetic oligonucleotide
gttgtctgatatcacaca

SEQ ID NO: 3487 - DNA, 18 bp, Artificial Sequence
  Description of Artificial Sequence: Synthetic oligonucleotide
agttgtctgatatcacac

SEQ ID NO: 3488 - DNA, 18 bp, Artificial Sequence
  Description of Artificial Sequence: Synthetic oligonucleotide
atcaacaacttcaactac

SEQ ID NO: 3489 - DNA, 18 bp, Artificial Sequence
  Description of Artificial Sequence: Synthetic oligonucleotide
tatcaacaacttcaacta

SEQ ID NO: 3490 - DNA, 18 bp, Artificial Sequence
  Description of Artificial Sequence: Synthetic oligonucleotide
ttatcaacaacttcaact

SEQ ID NO: 3491 - DNA, 18 bp, Artificial Sequence
  Description of Artificial Sequence: Synthetic oligonucleotide
atcgtaacaatcaaagta

SEQ ID NO: 3492 - DNA, 18 bp, Artificial Sequence
  Description of Artificial Sequence: Synthetic oligonucleotide
catcgtaacaatcaaagt

SEQ ID NO: 3493 - DNA, 18 bp, Artificial Sequence
  Description of Artificial Sequence: Synthetic oligonucleotide
ccatcgtaacaatcaaag

SEQ ID NO: 3494 - DNA, 18 bp, Artificial Sequence
  Description of Artificial Sequence: Synthetic oligonucleotide
accatcgtaacaatcaaa

SEQ ID NO: 3495 - DNA, 18 bp, Artificial Sequence
  Description of Artificial Sequence: Synthetic oligonucleotide
caccatcgtaacaatcaa

SEQ ID NO: 3496 - DNA, 18 bp, Artificial Sequence
  Description of Artificial Sequence: Synthetic oligonucleotide
ccaccatcgtaacaatca

SEQ ID NO: 3497 - DNA, 18 bp, Artificial Sequence
  Description of Artificial Sequence: Synthetic oligonucleotide
gccaccatcgtaacaatc

SEQ ID NO: 3498 - DNA, 18 bp, Artificial Sequence
  Description of Artificial Sequence: Synthetic oligonucleotide
agccaccatcgtaacaat

SEQ ID NO: 3499 - DNA, 18 bp, Artificial Sequence
  Description of Artificial Sequence: Synthetic oligonucleotide
cagccaccatcgtaacaa

SEQ ID NO: 3500 - DNA, 18 bp, Artificial Sequence
  Description of Artificial Sequence: Synthetic oligonucleotide
acagccaccatcgtaaca

SEQ ID NO: 3501 - DNA, 18 bp, Artificial Sequence
  Description of Artificial Sequence: Synthetic oligonucleotide
tacagccaccatcgtaac

SEQ ID NO: 3502 - DNA, 18 bp, Artificial Sequence
  Description of Artificial Sequence: Synthetic oligonucleotide
atacagccaccatcgtaa

SEQ ID NO: 3503 - DNA, 18 bp, Artificial Sequence
  Description of Artificial Sequence: Synthetic oligonucleotide
tctagccttaccccattt

SEQ ID NO: 3504 - DNA, 18 bp, Artificial Sequence
  Description of Artificial Sequence: Synthetic oligonucleotide
gtctagccttaccccatt

SEQ ID NO: 3505 - DNA, 18 bp, Artificial Sequence
  Description of Artificial Sequence: Synthetic oligonucleotide
agtctagccttaccccat

SEQ ID NO: 3506 - DNA, 18 bp, Artificial Sequence
  Description of Artificial Sequence: Synthetic oligonucleotide
aagtctagccttacccca

SEQ ID NO: 3507 - DNA, 18 bp, Artificial Sequence
  Description of Artificial Sequence: Synthetic oligonucleotide
aaagtctagccttacccc

SEQ ID NO: 3508 - DNA, 18 bp, Artificial Sequence
  Description of Artificial Sequence: Synthetic oligonucleotide
taaagtctagccttaccc

SEQ ID NO: 3509 - DNA, 18 bp, Artificial Sequence
  Description of Artificial Sequence: Synthetic oligonucleotide
ataaagtctagccttacc

SEQ ID NO: 3510 - DNA, 18 bp, Artificial Sequence
  Description of Artificial Sequence: Synthetic oligonucleotide
aataaagtctagccttac

SEQ ID NO: 3511 - DNA, 18 bp, Artificial Sequence
  Description of Artificial Sequence: Synthetic oligonucleotide
taataaagtctagcctta

SEQ ID NO: 3512 - DNA, 18 bp, Artificial Sequence
  Description of Artificial Sequence: Synthetic oligonucleotide
ataataaagtctagcctt

SEQ ID NO: 3513 - DNA, 18 bp, Artificial Sequence
  Description of Artificial Sequence: Synthetic oligonucleotide
cataataaagtctagcct

SEQ ID NO: 3514 - DNA, 18 bp, Artificial Sequence
  Description of Artificial Sequence: Synthetic oligonucleotide
tcataataaagtctagcc

SEQ ID NO: 3515 - DNA, 18 bp, Artificial Sequence
  Description of Artificial Sequence: Synthetic oligonucleotide
atcctcataactcattga

SEQ ID NO: 3516 - DNA, 18 bp, Artificial Sequence
  Description of Artificial Sequence: Synthetic oligonucleotide
gatcctcataactcattg

SEQ ID NO: 3517 - DNA, 18 bp, Artificial Sequence
  Description of Artificial Sequence: Synthetic oligonucleotide
tgatcctcataactcatt

SEQ ID NO: 3518 - DNA, 18 bp, Artificial Sequence
  Description of Artificial Sequence: Synthetic oligonucleotide
ttgatcctcataactcat

SEQ ID NO: 3519 - DNA, 18 bp, Artificial Sequence
  Description of Artificial Sequence: Synthetic oligonucleotide
cttgatcctcataactca

SEQ ID NO: 3520 - DNA, 18 bp, Artificial Sequence
  Description of Artificial Sequence: Synthetic oligonucleotide
tcttgatcctcataactc

SEQ ID NO: 3521 - DNA, 18 bp, Artificial Sequence
  Description of Artificial Sequence: Synthetic oligonucleotide
atcttgatcctcataact

SEQ ID NO: 3522 - DNA, 18 bp, Artificial Sequence
  Description of Artificial Sequence: Synthetic oligonucleotide
catcttgatcctcataac

SEQ ID NO: 3523 - DNA, 18 bp, Artificial Sequence
  Description of Artificial Sequence: Synthetic oligonucleotide
gcatcttgatcctcataa

SEQ ID NO: 3524 - DNA, 18 bp, Artificial Sequence
  Description of Artificial Sequence: Synthetic oligonucleotide
tgcatcttgatcctcata

SEQ ID NO: 3525 - DNA, 18 bp, Artificial Sequence
  Description of Artificial Sequence: Synthetic oligonucleotide
gtgcatcttgatcctcat

SEQ ID NO: 3526 - DNA, 18 bp, Artificial Sequence
  Description of Artificial Sequence: Synthetic oligonucleotide
agtgcatcttgatcctca

SEQ ID NO: 3527 - DNA, 18 bp, Artificial Sequence
  Description of Artificial Sequence: Synthetic oligonucleotide
aagattcatttgagttat

SEQ ID NO: 3528 - DNA, 18 bp, Artificial Sequence
  Description of Artificial Sequence: Synthetic oligonucleotide
taagattcatttgagtta

SEQ ID NO: 3529 - DNA, 18 bp, Artificial Sequence
  Description of Artificial Sequence: Synthetic oligonucleotide
ttaagattcatttgagtt

SEQ ID NO: 3530 - DNA, 18 bp, Artificial Sequence
  Description of Artificial Sequence: Synthetic oligonucleotide
cttaagattcatttgagt

SEQ ID NO: 3531 - DNA, 18 bp, Artificial Sequence
  Description of Artificial Sequence: Synthetic oligonucleotide
acttaagattcatttgag

SEQ ID NO: 3532 - DNA, 18 bp, Artificial Sequence
  Description of Artificial Sequence: Synthetic oligonucleotide
tacttaagattcatttga

SEQ ID NO: 3533 - DNA, 18 bp, Artificial Sequence
  Description of Artificial Sequence: Synthetic oligonucleotide
atacttaagattcatttg

SEQ ID NO: 3534 - DNA, 18 bp, Artificial Sequence
  Description of Artificial Sequence: Synthetic oligonucleotide
catacttaagattcattt

SEQ ID NO: 3535 - DNA, 18 bp, Artificial Sequence
  Description of Artificial Sequence: Synthetic oligonucleotide
gcatacttaagattcatt

SEQ ID NO: 3536 - DNA, 18 bp, Artificial Sequence
  Description of Artificial Sequence: Synthetic oligonucleotide
ggcatacttaagattcat

SEQ ID NO: 3537 - DNA, 18 bp, Artificial Sequence
  Description of Artificial Sequence: Synthetic oligonucleotide
tggcatacttaagattca

SEQ ID NO: 3538 - DNA, 18 bp, Artificial Sequence
  Description of Artificial Sequence: Synthetic oligonucleotide
atggcatacttaagattc

SEQ ID NO: 3539 - DNA, 18 bp, Artificial Sequence
  Description of Artificial Sequence: Synthetic oligonucleotide
aatggcatacttaagatt

SEQ ID NO: 3540 - DNA, 18 bp, Artificial Sequence
  Description of Artificial Sequence: Synthetic oligonucleotide
taatggcatacttaagat

SEQ ID NO: 3541 - DNA, 18 bp, Artificial Sequence
  Description of Artificial Sequence: Synthetic oligonucleotide
ctaatggcatacttaaga

SEQ ID NO: 3542 - DNA, 18 bp, Artificial Sequence
  Description of Artificial Sequence: Synthetic oligonucleotide
actaatggcatacttaag

SEQ ID NO: 3543 - DNA, 18 bp, Artificial Sequence
  Description of Artificial Sequence: Synthetic oligonucleotide
cactaatggcatacttaa

SEQ ID NO: 3544 - DNA, 18 bp, Artificial Sequence
  Description of Artificial Sequence: Synthetic oligonucleotide
gcactaatggcatactta

SEQ ID NO: 3545 - DNA, 18 bp, Artificial Sequence
  Description of Artificial Sequence: Synthetic oligonucleotide
tgcactaatggcatactt

SEQ ID NO: 3546 - DNA, 18 bp, Artificial Sequence
  Description of Artificial Sequence: Synthetic oligonucleotide
ttgcactaatggcatact

SEQ ID NO: 3547 - DNA, 18 bp, Artificial Sequence
  Description of Artificial Sequence: Synthetic oligonucleotide
tttgcactaatggcatac

SEQ ID NO: 3548 - DNA, 18 bp, Artificial Sequence
  Description of Artificial Sequence: Synthetic oligonucleotide
ctttgcactaatggcata

SEQ ID NO: 3549 - DNA, 18 bp, Artificial Sequence
  Description of Artificial Sequence: Synthetic oligonucleotide
tctttgcactaatggcat

SEQ ID NO: 3550 - DNA, 18 bp, Artificial Sequence
  Description of Artificial Sequence: Synthetic oligonucleotide
ttctttgcactaatggca

SEQ ID NO: 3551 - DNA, 18 bp, Artificial Sequence
  Description of Artificial Sequence: Synthetic oligonucleotide
attctttgcactaatggc

SEQ ID NO: 3552 - DNA, 18 bp, Artificial Sequence
  Description of Artificial Sequence: Synthetic oligonucleotide
tattctttgcactaatgg

SEQ ID NO: 3553 - DNA, 18 bp, Artificial Sequence
  Description of Artificial Sequence: Synthetic oligonucleotide
ctattctttgcactaatg

SEQ ID NO: 3554 - DNA, 18 bp, Artificial Sequence
  Description of Artificial Sequence: Synthetic oligonucleotide
tctattctttgcactaat

SEQ ID NO: 3555 - DNA, 18 bp, Artificial Sequence
  Description of Artificial Sequence: Synthetic oligonucleotide
ctctattctttgcactaa

SEQ ID NO: 3556 - DNA, 18 bp, Artificial Sequence
  Description of Artificial Sequence: Synthetic oligonucleotide
gctctattctttgcacta

SEQ ID NO: 3557 - DNA, 18 bp, Artificial Sequence
  Description of Artificial Sequence: Synthetic oligonucleotide
agctctattctttgcact

SEQ ID NO: 3558 - DNA, 18 bp, Artificial Sequence
  Description of Artificial Sequence: Synthetic oligonucleotide
gagctctattctttgcac

SEQ ID NO: 3559 - DNA, 18 bp, Artificial Sequence
  Description of Artificial Sequence: Synthetic oligonucleotide
cgagctctattctttgca

SEQ ID NO: 3560 - DNA, 18 bp, Artificial Sequence
  Description of Artificial Sequence: Synthetic oligonucleotide
gcgagctctattctttgc

SEQ ID NO: 3561 - DNA, 18 bp, Artificial Sequence
  Description of Artificial Sequence: Synthetic oligonucleotide
tgcgagctctattctttg

SEQ ID NO: 3562 - DNA, 18 bp, Artificial Sequence
  Description of Artificial Sequence: Synthetic oligonucleotide
gtgcgagctctattcttt

SEQ ID NO: 3563 - DNA, 18 bp, Artificial Sequence
  Description of Artificial Sequence: Synthetic oligonucleotide
ggtgcgagctctattctt

SEQ ID NO: 3564 - DNA, 18 bp, Artificial Sequence
  Description of Artificial Sequence: Synthetic oligonucleotide
cggtgcgagctctattct

SEQ ID NO: 3565 - DNA, 18 bp, Artificial Sequence
  Description of Artificial Sequence: Synthetic oligonucleotide
acggtgcgagctctattc

SEQ ID NO: 3566 - DNA, 18 bp, Artificial Sequence
  Description of Artificial Sequence: Synthetic oligonucleotide
tacggtgcgagctctatt

SEQ ID NO: 3567 - DNA, 18 bp, Artificial Sequence
  Description of Artificial Sequence: Synthetic oligonucleotide
ctacggtgcgagctctat

SEQ ID NO: 3568 - DNA, 18 bp, Artificial Sequence
  Description of Artificial Sequence: Synthetic oligonucleotide
gctacggtgcgagctcta

SEQ ID NO: 3569 - DNA, 18 bp, Artificial Sequence
  Description of Artificial Sequence: Synthetic oligonucleotide
agctacggtgcgagctct

SEQ ID NO: 3570 - DNA, 18 bp, Artificial Sequence
  Description of Artificial Sequence: Synthetic oligonucleotide
cagctacggtgcgagctc

SEQ ID NO: 3571 - DNA, 18 bp, Artificial Sequence
  Description of Artificial Sequence: Synthetic oligonucleotide
ccagctacggtgcgagct

SEQ ID NO: 3572 - DNA, 18 bp, Artificial Sequence
  Description of Artificial Sequence: Synthetic oligonucleotide
accagctacggtgcgagc

SEQ ID NO: 3573 - DNA, 18 bp, Artificial Sequence
  Description of Artificial Sequence: Synthetic oligonucleotide
caccagctacggtgcgag

SEQ ID NO: 3574 - DNA, 18 bp, Artificial Sequence
  Description of Artificial Sequence: Synthetic oligonucleotide
acaccagctacggtgcga

SEQ ID NO: 3575 - DNA, 18 bp, Artificial Sequence
  Description of Artificial Sequence: Synthetic oligonucleotide
gacaccagctacggtgcg

SEQ ID NO: 3576 - DNA, 18 bp, Artificial Sequence
  Description of Artificial Sequence: Synthetic oligonucleotide
agacaccagctacggtgc

SEQ ID NO: 3577 - DNA, 18 bp, Artificial Sequence
  Description of Artificial Sequence: Synthetic oligonucleotide
gagacaccagctacggtg

SEQ ID NO: 3578 - DNA, 18 bp, Artificial Sequence
  Description of Artificial Sequence: Synthetic oligonucleotide
agagacaccagctacggt

SEQ ID NO: 3579 - DNA, 18 bp, Artificial Sequence
  Description of Artificial Sequence: Synthetic oligonucleotide
tagagacaccagctacgg

SEQ ID NO: 3580 - DNA, 18 bp, Artificial Sequence
  Description of Artificial Sequence: Synthetic oligonucleotide
atagagacaccagctacg

SEQ ID NO: 3581 - DNA, 18 bp, Artificial Sequence
  Description of Artificial Sequence: Synthetic oligonucleotide
gatagagacaccagctac

SEQ ID NO: 3582 - DNA, 18 bp, Artificial Sequence
  Description of Artificial Sequence: Synthetic oligonucleotide
agatagagacaccagcta

SEQ ID NO: 3583 - DNA, 18 bp, Artificial Sequence
  Description of Artificial Sequence: Synthetic oligonucleotide
cagatagagacaccagct

SEQ ID NO: 3584 - DNA, 18 bp, Artificial Sequence
  Description of Artificial Sequence: Synthetic oligonucleotide
acagatagagacaccagc

SEQ ID NO: 3585 - DNA, 18 bp, Artificial Sequence
  Description of Artificial Sequence: Synthetic oligonucleotide
tacagatagagacaccag

SEQ ID NO: 3586 - DNA, 18 bp, Artificial Sequence
  Description of Artificial Sequence: Synthetic oligonucleotide
ctacagatagagacacca

SEQ ID NO: 3587 - DNA, 18 bp, Artificial Sequence
  Description of Artificial Sequence: Synthetic oligonucleotide
actacagatagagacacc

SEQ ID NO: 3588 - DNA, 18 bp, Artificial Sequence
  Description of Artificial Sequence: Synthetic oligonucleotide
tactacagatagagacac

SEQ ID NO: 3589 - DNA, 18 bp, Artificial Sequence
  Description of Artificial Sequence: Synthetic oligonucleotide
gtactacagatagagaca

SEQ ID NO: 3590 - DNA, 18 bp, Artificial Sequence
  Description of Artificial Sequence: Synthetic oligonucleotide
agtactacagatagagac

SEQ ID NO: 3591 - DNA, 18 bp, Artificial Sequence
  Description of Artificial Sequence: Synthetic oligonucleotide
tagtactacagatagaga

SEQ ID NO: 3592 - DNA, 18 bp, Artificial Sequence
  Description of Artificial Sequence: Synthetic oligonucleotide
atagtactacagatagag

SEQ ID NO: 3593 - DNA, 18 bp, Artificial Sequence
  Description of Artificial Sequence: Synthetic oligonucleotide
catagtactacagataga

SEQ ID NO: 3594 - DNA, 18 bp, Artificial Sequence
  Description of Artificial Sequence: Synthetic oligonucleotide
tcatagtactacagatag

SEQ ID NO: 3595 - DNA, 18 bp, Artificial Sequence
  Description of Artificial Sequence: Synthetic oligonucleotide
gtcatagtactacagata

SEQ ID NO: 3596 - DNA, 18 bp, Artificial Sequence
  Description of Artificial Sequence: Synthetic oligonucleotide
tctagtggcggctattga

SEQ ID NO: 3597 - DNA, 18 bp, Artificial Sequence
  Description of Artificial Sequence: Synthetic oligonucleotide
ctctagtggcggctattg

SEQ ID NO: 3598 - DNA, 18 bp, Artificial Sequence
  Description of Artificial Sequence: Synthetic oligonucleotide
cctctagtggcggctatt

SEQ ID NO: 3599 - DNA, 18 bp, Artificial Sequence
  Description of Artificial Sequence: Synthetic oligonucleotide
tcctctagtggcggctat

SEQ ID NO: 3600 - DNA, 18 bp, Artificial Sequence
  Description of Artificial Sequence: Synthetic oligonucleotide
ctcctctagtggcggcta

SEQ ID NO: 3601 - DNA, 18 bp, Artificial Sequence
  Description of Artificial Sequence: Synthetic oligonucleotide
gctcctctagtggcggct

SEQ ID NO: 3602 - DNA, 18 bp, Artificial Sequence
  Description of Artificial Sequence: Synthetic oligonucleotide
agctcctctagtggcggc

SEQ ID NO: 3603 - DNA, 18 bp, Artificial Sequence
  Description of Artificial Sequence: Synthetic oligonucleotide
tagctcctctagtggcgg

SEQ ID NO: 3604 - DNA, 18 bp, Artificial Sequence
  Description of Artificial Sequence: Synthetic oligonucleotide
gtagctcctctagtggcg

SEQ ID NO: 3605 - DNA, 18 bp, Artificial Sequence
  Description of Artificial Sequence: Synthetic oligonucleotide
agtagctcctctagtggc

SEQ ID NO: 3606 - DNA, 18 bp, Artificial Sequence
  Description of Artificial Sequence: Synthetic oligonucleotide
cagtagctcctctagtgg

SEQ ID NO: 3607 - DNA, 18 bp, Artificial Sequence
  Description of Artificial Sequence: Synthetic oligonucleotide
acagtagctcctctagtg

SEQ ID NO: 3608 - DNA, 18 bp, Artificial Sequence
  Description of Artificial Sequence: Synthetic oligonucleotide
catgttaggcatggctct

SEQ ID NO: 3609 - DNA, 18 bp, Artificial Sequence
  Description of Artificial Sequence: Synthetic oligonucleotide
gcatgttaggcatggctc

SEQ ID NO: 3610 - DNA, 18 bp, Artificial Sequence
  Description of Artificial Sequence: Synthetic oligonucleotide
agcatgttaggcatggct

SEQ ID NO: 3611 - DNA, 18 bp, Artificial Sequence
  Description of Artificial Sequence: Synthetic oligonucleotide
aagcatgttaggcatggc

SEQ ID NO: 3612 - DNA, 18 bp, Artificial Sequence
  Description of Artificial Sequence: Synthetic oligonucleotide
taagcatgttaggcatgg

SEQ ID NO: 3613 - DNA, 18 bp, Artificial Sequence
  Description of Artificial Sequence: Synthetic oligonucleotide
ctaagcatgttaggcatg

SEQ ID NO: 3614 - DNA, 18 bp, Artificial Sequence
  Description of Artificial Sequence: Synthetic oligonucleotide
tttgcgagcaagaacaag

SEQ ID NO: 3615 - DNA, 18 bp, Artificial Sequence
  Description of Artificial Sequence: Synthetic oligonucleotide
gtttgcgagcaagaacaa

SEQ ID NO: 3616 - DNA, 18 bp, Artificial Sequence
  Description of Artificial Sequence: Synthetic oligonucleotide
tgtttgcgagcaagaaca

SEQ ID NO: 3617 - DNA, 18 bp, Artificial Sequence
  Description of Artificial Sequence: Synthetic oligonucleotide
atgtttgcgagcaagaac

SEQ ID NO: 3618 - DNA, 18 bp, Artificial Sequence
  Description of Artificial Sequence: Synthetic oligonucleotide
tatgtttgcgagcaagaa

SEQ ID NO: 3619 - DNA, 18 bp, Artificial Sequence
  Description of Artificial Sequence: Synthetic oligonucleotide
attagcataagcagttgt

SEQ ID NO: 3620 - DNA, 18 bp, Artificial Sequence
  Description of Artificial Sequence: Synthetic oligonucleotide
tattagcataagcagttg

SEQ ID NO: 3621 - DNA, 18 bp, Artificial Sequence
  Description of Artificial Sequence: Synthetic oligonucleotide
ctattagcataagcagtt

SEQ ID NO: 3622 - DNA, 18 bp, Artificial Sequence
  Description of Artificial Sequence: Synthetic oligonucleotide
actattagcataagcagt

SEQ ID NO: 3623 - DNA, 18 bp, Artificial Sequence
  Description of Artificial Sequence: Synthetic oligonucleotide
cactattagcataagcag

SEQ ID NO: 3624 - DNA, 18 bp, Artificial Sequence
  Description of Artificial Sequence: Synthetic oligonucleotide
acactattagcataagca

SEQ ID NO: 3625 - DNA, 18 bp, Artificial Sequence
  Description of Artificial Sequence: Synthetic oligonucleotide
tctatagagacactcata

SEQ ID NO: 3626 - DNA, 18 bp, Artificial Sequence
  Description of Artificial Sequence: Synthetic oligonucleotide
ttctatagagacactcat

SEQ ID NO: 3627 - DNA, 18 bp, Artificial Sequence
  Description of Artificial Sequence: Synthetic oligonucleotide
tttctatagagacactca

SEQ ID NO: 3628 - DNA, 18 bp, Artificial Sequence
  Description of Artificial Sequence: Synthetic oligonucleotide
atttctatagagacactc

SEQ ID NO: 3629 - DNA, 18 bp, Artificial Sequence
  Description of Artificial Sequence: Synthetic oligonucleotide
tatttctatagagacact

SEQ ID NO: 3630 - DNA, 18 bp, Artificial Sequence
  Description of Artificial Sequence: Synthetic oligonucleotide
ctatttctatagagacac

SEQ ID NO: 3631 - DNA, 18 bp, Artificial Sequence
  Description of Artificial Sequence: Synthetic oligonucleotide
aaggtcagtctcagtcca

SEQ ID NO: 3632 - DNA, 18 bp, Artificial Sequence
  Description of Artificial Sequence: Synthetic oligonucleotide
taaggtcagtctcagtcc

SEQ ID NO: 3633 - DNA, 18 bp, Artificial Sequence
  Description of Artificial Sequence: Synthetic oligonucleotide
gtaaggtcagtctcagtc

SEQ ID NO: 3634 - DNA, 18 bp, Artificial Sequence
  Description of Artificial Sequence: Synthetic oligonucleotide
agtaaggtcagtctcagt

SEQ ID NO: 3635 - DNA, 18 bp, Artificial Sequence
  Description of Artificial Sequence: Synthetic oligonucleotide
tagtaaggtcagtctcag

SEQ ID NO: 3636 - DNA, 18 bp, Artificial Sequence
  Description of Artificial Sequence: Synthetic oligonucleotide
ttagtaaggtcagtctca

SEQ ID NO: 3637 - DNA, 18 bp, Artificial Sequence
  Description of Artificial Sequence: Synthetic oligonucleotide
tttagtaaggtcagtctc

SEQ ID NO: 3638 - DNA, 18 bp, Artificial Sequence
  Description of Artificial Sequence: Synthetic oligonucleotide
ctttagtaaggtcagtct

SEQ ID NO: 3639 - DNA, 18 bp, Artificial Sequence
  Description of Artificial Sequence: Synthetic oligonucleotide
cctttagtaaggtcagtc

SEQ ID NO: 3640 - DNA, 18 bp, Artificial Sequence
  Description of Artificial Sequence: Synthetic oligonucleotide
tcctttagtaaggtcagt

SEQ ID NO: 3641 - DNA, 18 bp, Artificial Sequence
  Description of Artificial Sequence: Synthetic oligonucleotide
gtcctttagtaaggtcag

SEQ ID NO: 3642 - DNA, 18 bp, Artificial Sequence
  Description of Artificial Sequence: Synthetic oligonucleotide
ggtcctttagtaaggtca

SEQ ID NO: 3643 - DNA, 18 bp, Artificial Sequence
  Description of Artificial Sequence: Synthetic oligonucleotide
aggtcctttagtaaggtc

SEQ ID NO: 3644 - DNA, 18 bp, Artificial Sequence
  Description of Artificial Sequence: Synthetic oligonucleotide
gaggtcctttagtaaggt

SEQ ID NO: 3645 - DNA, 18 bp, Artificial Sequence
  Description of Artificial Sequence: Synthetic oligonucleotide
tgaggtcctttagtaagg

SEQ ID NO: 3646 - DNA, 18 bp, Artificial Sequence
  Description of Artificial Sequence: Synthetic oligonucleotide
tttaactagcattgtatg

SEQ ID NO: 3647 - DNA, 18 bp, Artificial Sequence
  Description of Artificial Sequence: Synthetic oligonucleotide
gtttaactagcattgtat

SEQ ID NO: 3648 - DNA, 18 bp, Artificial Sequence
  Description of Artificial Sequence: Synthetic oligonucleotide
tgtttaactagcattgta

SEQ ID NO: 3649 - DNA, 18 bp, Artificial Sequence
  Description of Artificial Sequence: Synthetic oligonucleotide
aagtgtaccatctgtttt

SEQ ID NO: 3650 - DNA, 18 bp, Artificial Sequence
  Description of Artificial Sequence: Synthetic oligonucleotide
taagtgtaccatctgttt

SEQ ID NO: 3651 - DNA, 18 bp, Artificial Sequence
  Description of Artificial Sequence: Synthetic oligonucleotide
ataagtgtaccatctgtt

SEQ ID NO: 3652 - DNA, 18 bp, Artificial Sequence
  Description of Artificial Sequence: Synthetic oligonucleotide
cataagtgtaccatctgt

SEQ ID NO: 3653 - DNA, 18 bp, Artificial Sequence
  Description of Artificial Sequence: Synthetic oligonucleotide
tcataagtgtaccatctg

SEQ ID NO: 3654 - DNA, 18 bp, Artificial Sequence
  Description of Artificial Sequence: Synthetic oligonucleotide
atcataagtgtaccatct

SEQ ID NO: 3655 - DNA, 18 bp, Artificial Sequence
  Description of Artificial Sequence: Synthetic oligonucleotide
aatcataagtgtaccatc

SEQ ID NO: 3656 - DNA, 18 bp, Artificial Sequence
  Description of Artificial Sequence: Synthetic oligonucleotide
caatcataagtgtaccat

SEQ ID NO: 3657 - DNA, 18 bp, Artificial Sequence
  Description of Artificial Sequence: Synthetic oligonucleotide
tcaatcataagtgtacca

SEQ ID NO: 3658 - DNA, 18 bp, Artificial Sequence
  Description of Artificial Sequence: Synthetic oligonucleotide
agcatactcctgattagg

SEQ ID NO: 3659 - DNA, 18 bp, Artificial Sequence
  Description of Artificial Sequence: Synthetic oligonucleotide
cagcatactcctgattag

SEQ ID NO: 3660 - DNA, 18 bp, Artificial Sequence
  Description of Artificial Sequence: Synthetic oligonucleotide
tcagcatactcctgatta

SEQ ID NO: 3661 - DNA, 18 bp, Artificial Sequence
  Description of Artificial Sequence: Synthetic oligonucleotide
atcagcatactcctgatt

SEQ ID NO: 3662 - DNA, 18 bp, Artificial Sequence
  Description of Artificial Sequence: Synthetic oligonucleotide
catcagcatactcctgat

SEQ ID NO: 3663 - DNA, 18 bp, Artificial Sequence
  Description of Artificial Sequence: Synthetic oligonucleotide
acatcagcatactcctga

SEQ ID NO: 3664 - DNA, 18 bp, Artificial Sequence
  Description of Artificial Sequence: Synthetic oligonucleotide
ataaaactcaggttccca

SEQ ID NO: 3665 - DNA, 18 bp, Artificial Sequence
  Description of Artificial Sequence: Synthetic oligonucleotide
cataaaactcaggttccc

SEQ ID NO: 3666 - DNA, 18 bp, Artificial Sequence
  Description of Artificial Sequence: Synthetic oligonucleotide
tcataaaactcaggttcc

SEQ ID NO: 3667 - DNA, 18 bp, Artificial Sequence
  Description of Artificial Sequence: Synthetic oligonucleotide
aatagctcatacctccta

SEQ ID NO: 3668 - DNA, 18 bp, Artificial Sequence
  Description of Artificial Sequence: Synthetic oligonucleotide
taatagctcatacctcct

SEQ ID NO: 3669 - DNA, 18 bp, Artificial Sequence
  Description of Artificial Sequence: Synthetic oligonucleotide
ttcaaaggtgtactctcc

SEQ ID NO: 3670 - DNA, 18 bp, Artificial Sequence
  Description of Artificial Sequence: Synthetic oligonucleotide
tttcaaaggtgtactctc

SEQ ID NO: 3671 - DNA, 18 bp, Artificial Sequence
  Description of Artificial Sequence: Synthetic oligonucleotide
ttttcaaaggtgtactct

SEQ ID NO: 3672 - DNA, 18 bp, Artificial Sequence
  Description of Artificial Sequence: Synthetic oligonucleotide
tttttcaaaggtgtactc

SEQ ID NO: 3673 - DNA, 18 bp, Artificial Sequence
  Description of Artificial Sequence: Synthetic oligonucleotide
ctttttcaaaggtgtact

SEQ ID NO: 3674 - DNA, 18 bp, Artificial Sequence
  Description of Artificial Sequence: Synthetic oligonucleotide
cctttttcaaaggtgtac

SEQ ID NO: 3675 - DNA, 18 bp, Artificial Sequence
  Description of Artificial Sequence: Synthetic oligonucleotide
acctttttcaaaggtgta

SEQ ID NO: 3676 - DNA, 18 bp, Artificial Sequence
  Description of Artificial Sequence: Synthetic oligonucleotide
cacctttttcaaaggtgt

SEQ ID NO: 3677 - DNA, 18 bp, Artificial Sequence
  Description of Artificial Sequence: Synthetic oligonucleotide
tcacctttttcaaaggtg

SEQ ID NO: 3678 - DNA, 18 bp, Artificial Sequence
  Description of Artificial Sequence: Synthetic oligonucleotide
gtcacctttttcaaaggt

SEQ ID NO: 3679 - DNA, 18 bp, Artificial Sequence
  Description of Artificial Sequence: Synthetic oligonucleotide
agtcacctttttcaaagg

SEQ ID NO: 3680 - DNA, 18 bp, Artificial Sequence
  Description of Artificial Sequence: Synthetic oligonucleotide
tagtcacctttttcaaag

SEQ ID NO: 3681 - DNA, 18 bp, Artificial Sequence
  Description of Artificial Sequence: Synthetic oligonucleotide
atagtcacctttttcaaa

SEQ ID NO: 3682 - DNA, 18 bp, Artificial Sequence
  Description of Artificial Sequence: Synthetic oligonucleotide
catagtcacctttttcaa

SEQ ID NO: 3683 - DNA, 18 bp, Artificial Sequence
  Description of Artificial Sequence: Synthetic oligonucleotide
ccatagtcacctttttca

SEQ ID NO: 3684 - DNA, 18 bp, Artificial Sequence
  Description of Artificial Sequence: Synthetic oligonucleotide
accatagtcacctttttc

SEQ ID NO: 3685 - DNA, 18 bp, Artificial Sequence
  Description of Artificial Sequence: Synthetic oligonucleotide
caccatagtcaccttttt

SEQ ID NO: 3686 - DNA, 18 bp, Artificial Sequence
  Description of Artificial Sequence: Synthetic oligonucleotide
tcaccatagtcacctttt

SEQ ID NO: 3687 - DNA, 18 bp, Artificial Sequence
  Description of Artificial Sequence: Synthetic oligonucleotide
atcaccatagtcaccttt

SEQ ID NO: 3688 - DNA, 18 bp, Artificial Sequence
  Description of Artificial Sequence: Synthetic oligonucleotide
catcaccatagtcacctt

SEQ ID NO: 3689 - DNA, 18 bp, Artificial Sequence
  Description of Artificial Sequence: Synthetic oligonucleotide
gcatcaccatagtcacct

SEQ ID NO: 3690 - DNA, 18 bp, Artificial Sequence
  Description of Artificial Sequence: Synthetic oligonucleotide
agcatcaccatagtcacc

SEQ ID NO: 3691 - DNA, 18 bp, Artificial Sequence
  Description of Artificial Sequence: Synthetic oligonucleotide
cagcatcaccatagtcac

SEQ ID NO: 3692 - DNA, 18 bp, Artificial Sequence
  Description of Artificial Sequence: Synthetic oligonucleotide
acagcatcaccatagtca

SEQ ID NO: 3693 - DNA, 18 bp, Artificial Sequence
  Description of Artificial Sequence: Synthetic oligonucleotide
aacagcatcaccatagtc

SEQ ID NO: 3694 - DNA, 18 bp, Artificial Sequence
  Description of Artificial Sequence: Synthetic oligonucleotide
caacagcatcaccatagt

SEQ ID NO: 3695 - DNA, 18 bp, Artificial Sequence
  Description of Artificial Sequence: Synthetic oligonucleotide
acaacagcatcaccatag

SEQ ID NO: 3696 - DNA, 18 bp, Artificial Sequence
  Description of Artificial Sequence: Synthetic oligonucleotide
gtgctcttgtggcactag

SEQ ID NO: 3697 - DNA, 18 bp, Artificial Sequence
  Description of Artificial Sequence: Synthetic oligonucleotide
agtgctcttgtggcacta

SEQ ID NO: 3698 - DNA, 18 bp, Artificial Sequence
  Description of Artificial Sequence: Synthetic oligonucleotide
tagtgctcttgtggcact

SEQ ID NO: 3699 - DNA, 18 bp, Artificial Sequence
  Description of Artificial Sequence: Synthetic oligonucleotide
atagtgctcttgtggcac

SEQ ID NO: 3700 - DNA, 18 bp, Artificial Sequence
  Description of Artificial Sequence: Synthetic oligonucleotide
catagtgctcttgtggca

SEQ ID NO: 3701 - DNA, 18 bp, Artificial Sequence
  Description of Artificial Sequence: Synthetic oligonucleotide
acatagtgctcttgtggc

SEQ ID NO: 3702 - DNA, 18 bp, Artificial Sequence
  Description of Artificial Sequence: Synthetic oligonucleotide
agaaaactcatctgagat

SEQ ID NO: 3703 - DNA, 18 bp, Artificial Sequence
  Description of Artificial Sequence: Synthetic oligonucleotide
tagaaaactcatctgaga

SEQ ID NO: 3704 - DNA, 18 bp, Artificial Sequence
  Description of Artificial Sequence: Synthetic oligonucleotide
ctagaaaactcatctgag

SEQ ID NO: 3705 - DNA, 18 bp, Artificial Sequence
  Description of Artificial Sequence: Synthetic oligonucleotide
gctagaaaactcatctga

SEQ ID NO: 3706 - DNA, 18 bp, Artificial Sequence
  Description of Artificial Sequence: Synthetic oligonucleotide
tgctagaaaactcatctg

SEQ ID NO: 3707 - DNA, 18 bp, Artificial Sequence
  Description of Artificial Sequence: Synthetic oligonucleotide
ttgctagaaaactcatct

SEQ ID NO: 3708 - DNA, 18 bp, Artificial Sequence
  Description of Artificial Sequence: Synthetic oligonucleotide
attgctagaaaactcatc

SEQ ID NO: 3709 - DNA, 18 bp, Artificial Sequence
  Description of Artificial Sequence: Synthetic oligonucleotide
cattgctagaaaactcat

SEQ ID NO: 3710 - DNA, 18 bp, Artificial Sequence
  Description of Artificial Sequence: Synthetic oligonucleotide
acattgctagaaaactca

SEQ ID NO: 3711 - DNA, 18 bp, Artificial Sequence
  Description of Artificial Sequence: Synthetic oligonucleotide
aacattgctagaaaactc

SEQ ID NO: 3712 - DNA, 18 bp, Artificial Sequence
  Description of Artificial Sequence: Synthetic oligonucleotide
caacattgctagaaaact

SEQ ID NO: 3713 - DNA, 18 bp, Artificial Sequence
  Description of Artificial Sequence: Synthetic oligonucleotide
gcaacattgctagaaaac

SEQ ID NO: 3714 - DNA, 18 bp, Artificial Sequence
  Description of Artificial Sequence: Synthetic oligonucleotide
tgcaacattgctagaaaa

SEQ ID NO: 3715 - DNA, 18 bp, Artificial Sequence
  Description of Artificial Sequence: Synthetic oligonucleotide
ttgcaacattgctagaaa

SEQ ID NO: 3716 - DNA, 18 bp, Artificial Sequence
  Description of Artificial Sequence: Synthetic oligonucleotide
tttgcaacattgctagaa

SEQ ID NO: 3717 - DNA, 18 bp, Artificial Sequence
  Description of Artificial Sequence: Synthetic oligonucleotide
atttgcaacattgctaga

SEQ ID NO: 3718 - DNA, 18 bp, Artificial Sequence
  Description of Artificial Sequence: Synthetic oligonucleotide
aatttgcaacattgctag

SEQ ID NO: 3719 - DNA, 18 bp, Artificial Sequence
  Description of Artificial Sequence: Synthetic oligonucleotide
taatttgcaacattgcta

SEQ ID NO: 3720 - DNA, 18 bp, Artificial Sequence
  Description of Artificial Sequence: Synthetic oligonucleotide
accagtaccaggtggtcc

SEQ ID NO: 3721 - DNA, 18 bp, Artificial Sequence
  Description of Artificial Sequence: Synthetic oligonucleotide
taccagtaccaggtggtc

SEQ ID NO: 3722 - DNA, 18 bp, Artificial Sequence
  Description of Artificial Sequence: Synthetic oligonucleotide
ttaccagtaccaggtggt

SEQ ID NO: 3723 - DNA, 18 bp, Artificial Sequence
  Description of Artificial Sequence: Synthetic oligonucleotide
cttaccagtaccaggtgg

SEQ ID NO: 3724 - DNA, 18 bp, Artificial Sequence
  Description of Artificial Sequence: Synthetic oligonucleotide
tcttaccagtaccaggtg

SEQ ID NO: 3725 - DNA, 18 bp, Artificial Sequence
  Description of Artificial Sequence: Synthetic oligonucleotide
ctcttaccagtaccaggt

SEQ ID NO: 3726 - DNA, 18 bp, Artificial Sequence
  Description of Artificial Sequence: Synthetic oligonucleotide
actcttaccagtaccagg

SEQ ID NO: 3727 - DNA, 18 bp, Artificial Sequence
  Description of Artificial Sequence: Synthetic oligonucleotide
gactcttaccagtaccag

SEQ ID NO: 3728 - DNA, 18 bp, Artificial Sequence
  Description of Artificial Sequence: Synthetic oligonucleotide
tgactcttaccagtacca

SEQ ID NO: 3729 - DNA, 18 bp, Artificial Sequence
  Description of Artificial Sequence: Synthetic oligonucleotide
atgactcttaccagtacc

SEQ ID NO: 3730 - DNA, 18 bp, Artificial Sequence
  Description of Artificial Sequence: Synthetic oligonucleotide
aatgactcttaccagtac

SEQ ID NO: 3731 - DNA, 18 bp, Artificial Sequence
  Description of Artificial Sequence: Synthetic oligonucleotide
aaatgactcttaccagta

SEQ ID NO: 3732 - DNA, 18 bp, Artificial Sequence
  Description of Artificial Sequence: Synthetic oligonucleotide
aaaatgactcttaccagt

SEQ ID NO: 3733 - DNA, 18 bp, Artificial Sequence
  Description of Artificial Sequence: Synthetic oligonucleotide
caaaatgactcttaccag

SEQ ID NO: 3734 - DNA, 18 bp, Artificial Sequence
  Description of Artificial Sequence: Synthetic oligonucleotide
gcaaaatgactcttacca

SEQ ID NO: 3735 - DNA, 18 bp, Artificial Sequence
  Description of Artificial Sequence: Synthetic oligonucleotide
atacactatgcgagcaga

SEQ ID NO: 3736 - DNA, 18 bp, Artificial Sequence
  Description of Artificial Sequence: Synthetic oligonucleotide
tatacactatgcgagcag

SEQ ID NO: 3737 - DNA, 18 bp, Artificial Sequence
  Description of Artificial Sequence: Synthetic oligonucleotide
gtatacactatgcgagca

SEQ ID NO: 3738 - DNA, 18 bp, Artificial Sequence
  Description of Artificial Sequence: Synthetic oligonucleotide
tgaattcactttgaattt

SEQ ID NO: 3739 - DNA, 18 bp, Artificial Sequence
  Description of Artificial Sequence: Synthetic oligonucleotide
ttgaattcactttgaatt

SEQ ID NO: 3740 - DNA, 18 bp, Artificial Sequence
  Description of Artificial Sequence: Synthetic oligonucleotide
gttgaattcactttgaat

SEQ ID NO: 3741 - DNA, 18 bp, Artificial Sequence
  Description of Artificial Sequence: Synthetic oligonucleotide
tgttgaattcactttgaa

SEQ ID NO: 3742 - DNA, 18 bp, Artificial Sequence
  Description of Artificial Sequence: Synthetic oligonucleotide
gaacatgtctggacctat

SEQ ID NO: 3743 - DNA, 18 bp, Artificial Sequence
  Description of Artificial Sequence: Synthetic oligonucleotide
ggaacatgtctggaccta

SEQ ID NO: 3744 - DNA, 18 bp, Artificial Sequence
  Description of Artificial Sequence: Synthetic oligonucleotide
aggaacatgtctggacct

SEQ ID NO: 3745 - DNA, 18 bp, Artificial Sequence
  Description of Artificial Sequence: Synthetic oligonucleotide
aatttcagcaggacaacg

SEQ ID NO: 3746 - DNA, 18 bp, Artificial Sequence
  Description of Artificial Sequence: Synthetic oligonucleotide
caatttcagcaggacaac

SEQ ID NO: 3747 - DNA, 18 bp, Artificial Sequence
  Description of Artificial Sequence: Synthetic oligonucleotide
acaatttcagcaggacaa

SEQ ID NO: 3748 - DNA, 18 bp, Artificial Sequence
  Description of Artificial Sequence: Synthetic oligonucleotide
tgcagatgaaacatcatg

SEQ ID NO: 3749 - DNA, 18 bp, Artificial Sequence
  Description of Artificial Sequence: Synthetic oligonucleotide
ttgcagatgaaacatcat

SEQ ID NO: 3750 - DNA, 18 bp, Artificial Sequence
  Description of Artificial Sequence: Synthetic oligonucleotide
attgcagatgaaacatca

SEQ ID NO: 3751 - DNA, 18 bp, Artificial Sequence
  Description of Artificial Sequence: Synthetic oligonucleotide
agcttttctccaagcagg

SEQ ID NO: 3752 - DNA, 18 bp, Artificial Sequence
  Description of Artificial Sequence: Synthetic oligonucleotide
cagcttttctccaagcag

SEQ ID NO: 3753 - DNA, 18 bp, Artificial Sequence
  Description of Artificial Sequence: Synthetic oligonucleotide
acagcttttctccaagca

SEQ ID NO: 3754 - DNA, 18 bp, Artificial Sequence
  Description of Artificial Sequence: Synthetic oligonucleotide
gaatatgacatagtcata

SEQ ID NO: 3755 - DNA, 18 bp, Artificial Sequence
  Description of Artificial Sequence: Synthetic oligonucleotide
tgaatatgacatagtcat

SEQ ID NO: 3756 - DNA, 18 bp, Artificial Sequence
  Description of Artificial Sequence: Synthetic oligonucleotide
gtgaatatgacatagtca

SEQ ID NO: 3757 - DNA, 18 bp, Artificial Sequence
  Description of Artificial Sequence: Synthetic oligonucleotide
tctatcagacattatgca

SEQ ID NO: 3758 - DNA, 18 bp, Artificial Sequence
  Description of Artificial Sequence: Synthetic oligonucleotide
ctctatcagacattatgc

SEQ ID NO: 3759 - DNA, 18 bp, Artificial Sequence
  Description of Artificial Sequence: Synthetic oligonucleotide
tctctatcagacattatg

SEQ ID NO: 3760 - DNA, 18 bp, Artificial Sequence
  Description of Artificial Sequence: Synthetic oligonucleotide
gtgtgtaggtgcctgtgt

SEQ ID NO: 3761 - DNA, 18 bp, Artificial Sequence
  Description of Artificial Sequence: Synthetic oligonucleotide
ggtgtgtaggtgcctgtg

SEQ ID NO: 3762 - DNA, 18 bp, Artificial Sequence
  Description of Artificial Sequence: Synthetic oligonucleotide
aggtgtgtaggtgcctgt

SEQ ID NO: 3763 - DNA, 18 bp, Artificial Sequence
  Description of Artificial Sequence: Synthetic oligonucleotide
gaggtgtgtaggtgcctg

SEQ ID NO: 3764 - DNA, 18 bp, Artificial Sequence
  Description of Artificial Sequence: Synthetic oligonucleotide
tgaggtgtgtaggtgcct

SEQ ID NO: 3765 - DNA, 18 bp, Artificial Sequence
  Description of Artificial Sequence: Synthetic oligonucleotide
ctgaggtgtgtaggtgcc

SEQ ID NO: 3766 - DNA, 18 bp, Artificial Sequence
  Description of Artificial Sequence: Synthetic oligonucleotide
catcatagagatgagtct

SEQ ID NO: 3767 - DNA, 18 bp, Artificial Sequence
  Description of Artificial Sequence: Synthetic oligonucleotide
ccatcatagagatgagtc

SEQ ID NO: 3768 - DNA, 18 bp, Artificial Sequence
  Description of Artificial Sequence: Synthetic oligonucleotide
cccatcatagagatgagt

SEQ ID NO: 3769 - DNA, 18 bp, Artificial Sequence
  Description of Artificial Sequence: Synthetic oligonucleotide
acccatcatagagatgag

SEQ ID NO: 3770 - DNA, 18 bp, Artificial Sequence
  Description of Artificial Sequence: Synthetic oligonucleotide
aacccatcatagagatga

SEQ ID NO: 3771 - DNA, 18 bp, Artificial Sequence
  Description of Artificial Sequence: Synthetic oligonucleotide
aaacccatcatagagatg

SEQ ID NO: 3772 - DNA, 18 bp, Artificial Sequence
  Description of Artificial Sequence: Synthetic oligonucleotide
cacattttctaaactctg

SEQ ID NO: 3773 - DNA, 18 bp, Artificial Sequence
  Description of Artificial Sequence: Synthetic oligonucleotide
ccacattttctaaactct

SEQ ID NO: 3774 - DNA, 18 bp, Artificial Sequence
  Description of Artificial Sequence: Synthetic oligonucleotide
gccacattttctaaactc

SEQ ID NO: 3775 - DNA, 18 bp, Artificial Sequence
  Description of Artificial Sequence: Synthetic oligonucleotide
agccacattttctaaact

SEQ ID NO: 3776 - DNA, 18 bp, Artificial Sequence
  Description of Artificial Sequence: Synthetic oligonucleotide
aagccacattttctaaac

SEQ ID NO: 3777 - DNA, 18 bp, Artificial Sequence
  Description of Artificial Sequence: Synthetic oligonucleotide
cttagcccaaagctcaaa

SEQ ID NO: 3778 - DNA, 18 bp, Artificial Sequence
  Description of Artificial Sequence: Synthetic oligonucleotide
gcttagcccaaagctcaa

SEQ ID NO: 3779 - DNA, 18 bp, Artificial Sequence
  Description of Artificial Sequence: Synthetic oligonucleotide
cgcttagcccaaagctca

SEQ ID NO: 3780 - DNA, 18 bp, Artificial Sequence
  Description of Artificial Sequence: Synthetic oligonucleotide
acccaaattattgagtat

SEQ ID NO: 3781 - DNA, 18 bp, Artificial Sequence
  Description of Artificial Sequence: Synthetic oligonucleotide
cacccaaattattgagta

SEQ ID NO: 3782 - DNA, 18 bp, Artificial Sequence
  Description of Artificial Sequence: Synthetic oligonucleotide
acacccaaattattgagt

SEQ ID NO: 3783 - DNA, 18 bp, Artificial Sequence
  Description of Artificial Sequence: Synthetic oligonucleotide
aattaatgtgactccatt

SEQ ID NO: 3784 - DNA, 18 bp, Artificial Sequence
  Description of Artificial Sequence: Synthetic oligonucleotide
caattaatgtgactccat

SEQ ID NO: 3785 - DNA, 18 bp, Artificial Sequence
  Description of Artificial Sequence: Synthetic oligonucleotide
ccaattaatgtgactcca

SEQ ID NO: 3786 - DNA, 18 bp, Artificial Sequence
  Description of Artificial Sequence: Synthetic oligonucleotide
tccaattaatgtgactcc

SEQ ID NO: 3787 - DNA, 18 bp, Artificial Sequence
  Description of Artificial Sequence: Synthetic oligonucleotide
ctccaattaatgtgactc

SEQ ID NO: 3788 - DNA, 18 bp, Artificial Sequence
  Description of Artificial Sequence: Synthetic oligonucleotide
tctccaattaatgtgact

SEQ ID NO: 3789 - DNA, 18 bp, Artificial Sequence
  Description of Artificial Sequence: Synthetic oligonucleotide
ttctccaattaatgtgac

SEQ ID NO: 3790 - DNA, 18 bp, Artificial Sequence
  Description of Artificial Sequence: Synthetic oligonucleotide
tgcgacattcatcattat

SEQ ID NO: 3791 - DNA, 18 bp, Artificial Sequence
  Description of Artificial Sequence: Synthetic oligonucleotide
ttgcgacattcatcatta

SEQ ID NO: 3792 - DNA, 18 bp, Artificial Sequence
  Description of Artificial Sequence: Synthetic oligonucleotide
tttgcgacattcatcatt

SEQ ID NO: 3793 - DNA, 18 bp, Artificial Sequence
  Description of Artificial Sequence: Synthetic oligonucleotide
tctgttgttttctctaat

SEQ ID NO: 3794 - DNA, 18 bp, Artificial Sequence
  Description of Artificial Sequence: Synthetic oligonucleotide
ctctgttgttttctctaa

SEQ ID NO: 3795 - DNA, 18 bp, Artificial Sequence
  Description of Artificial Sequence: Synthetic oligonucleotide
actctgttgttttctcta

SEQ ID NO: 3796 - DNA, 18 bp, Artificial Sequence
  Description of Artificial Sequence: Synthetic oligonucleotide
aactctgttgttttctct

SEQ ID NO: 3797 - DNA, 18 bp, Artificial Sequence
  Description of Artificial Sequence: Synthetic oligonucleotide
caactctgttgttttctc

SEQ ID NO: 3798 - DNA, 18 bp, Artificial Sequence
  Description of Artificial Sequence: Synthetic oligonucleotide
acaactctgttgttttct

SEQ ID NO: 3799 - DNA, 18 bp, Artificial Sequence
  Description of Artificial Sequence: Synthetic oligonucleotide
gttctcatagagaacatt

SEQ ID NO: 3800 - DNA, 18 bp, Artificial Sequence
  Description of Artificial Sequence: Synthetic oligonucleotide
ggttctcatagagaacat

SEQ ID NO: 3801 - DNA, 18 bp, Artificial Sequence
  Description of Artificial Sequence: Synthetic oligonucleotide
tggttctcatagagaaca

SEQ ID NO: 3802 - DNA, 18 bp, Artificial Sequence
  Description of Artificial Sequence: Synthetic oligonucleotide
ttggttctcatagagaac

SEQ ID NO: 3803 - DNA, 18 bp, Artificial Sequence
  Description of Artificial Sequence: Synthetic oligonucleotide
tttggttctcatagagaa

SEQ ID NO: 3804 - DNA, 18 bp, Artificial Sequence
  Description of Artificial Sequence: Synthetic oligonucleotide
ttttggttctcatagaga

SEQ ID NO: 3805 - DNA, 18 bp, Artificial Sequence
  Description of Artificial Sequence: Synthetic oligonucleotide
tttttggttctcatagag

SEQ ID NO: 3806 - DNA, 18 bp, Artificial Sequence
  Description of Artificial Sequence: Synthetic oligonucleotide
gctaagttgtttaacaag

SEQ ID NO: 3807 - DNA, 18 bp, Artificial Sequence
  Description of Artificial Sequence: Synthetic oligonucleotide
agctaagttgtttaacaa

SEQ ID NO: 3808 - DNA, 18 bp, Artificial Sequence
  Description of Artificial Sequence: Synthetic oligonucleotide
gagctaagttgtttaaca

SEQ ID NO: 3809 - DNA, 18 bp, Artificial Sequence
  Description of Artificial Sequence: Synthetic oligonucleotide
agcaagattagcagaagc

SEQ ID NO: 3810 - DNA, 18 bp, Artificial Sequence
  Description of Artificial Sequence: Synthetic oligonucleotide
cagcaagattagcagaag

SEQ ID NO: 3811 - DNA, 18 bp, Artificial Sequence
  Description of Artificial Sequence: Synthetic oligonucleotide
gcagcaagattagcagaa

SEQ ID NO: 3812 - DNA, 18 bp, Artificial Sequence
  Description of Artificial Sequence: Synthetic oligonucleotide
agcagcaagattagcaga

SEQ ID NO: 3813 - DNA, 18 bp, Artificial Sequence
  Description of Artificial Sequence: Synthetic oligonucleotide
tagcagcaagattagcag

SEQ ID NO: 3814 - DNA, 18 bp, Artificial Sequence
  Description of Artificial Sequence: Synthetic oligonucleotide
gtagcagcaagattagca

SEQ ID NO: 3815 - DNA, 18 bp, Artificial Sequence
  Description of Artificial Sequence: Synthetic oligonucleotide
agtagcagcaagattagc

SEQ ID NO: 3816 - DNA, 18 bp, Artificial Sequence
  Description of Artificial Sequence: Synthetic oligonucleotide
tagtagcagcaagattag

SEQ ID NO: 3817 - DNA, 18 bp, Artificial Sequence
  Description of Artificial Sequence: Synthetic oligonucleotide
ttagtagcagcaagatta

SEQ ID NO: 3818 - DNA, 18 bp, Artificial Sequence
  Description of Artificial Sequence: Synthetic oligonucleotide
tttagtagcagcaagatt

SEQ ID NO: 3819 - DNA, 18 bp, Artificial Sequence
  Description of Artificial Sequence: Synthetic oligonucleotide
ttttagtagcagcaagat

SEQ ID NO: 3820 - DNA, 18 bp, Artificial Sequence
  Description of Artificial Sequence: Synthetic oligonucleotide
attttagtagcagcaaga

SEQ ID NO: 3821 - DNA, 18 bp, Artificial Sequence
  Description of Artificial Sequence: Synthetic oligonucleotide
cattttagtagcagcaag

SEQ ID NO: 3822 - DNA, 18 bp, Artificial Sequence
  Description of Artificial Sequence: Synthetic oligonucleotide
acattttagtagcagcaa

SEQ ID NO: 3823 - DNA, 18 bp, Artificial Sequence
  Description of Artificial Sequence: Synthetic oligonucleotide
gacattttagtagcagca

SEQ ID NO: 3824 - DNA, 18 bp, Artificial Sequence
  Description of Artificial Sequence: Synthetic oligonucleotide
tctttttgattgtccaag

SEQ ID NO: 3825 - DNA, 18 bp, Artificial Sequence
  Description of Artificial Sequence: Synthetic oligonucleotide
ctctttttgattgtccaa

SEQ ID NO: 3826 - DNA, 18 bp, Artificial Sequence
  Description of Artificial Sequence: Synthetic oligonucleotide
actctttttgattgtcca

SEQ ID NO: 3827 - DNA, 18 bp, Artificial Sequence
  Description of Artificial Sequence: Synthetic oligonucleotide
aactctttttgattgtcc

SEQ ID NO: 3828 - DNA, 18 bp, Artificial Sequence
  Description of Artificial Sequence: Synthetic oligonucleotide
caactctttttgattgtc

SEQ ID NO: 3829 - DNA, 18 bp, Artificial Sequence
  Description of Artificial Sequence: Synthetic oligonucleotide
tcaactctttttgattgt

SEQ ID NO: 3830 - DNA, 18 bp, Artificial Sequence
  Description of Artificial Sequence: Synthetic oligonucleotide
atctggtgatgtatgatt

SEQ ID NO: 3831 - DNA, 18 bp, Artificial Sequence
  Description of Artificial Sequence: Synthetic oligonucleotide
catctggtgatgtatgat

SEQ ID NO: 3832 - DNA, 18 bp, Artificial Sequence
  Description of Artificial Sequence: Synthetic oligonucleotide
acatctggtgatgtatga

SEQ ID NO: 3833 - DNA, 18 bp, Artificial Sequence
  Description of Artificial Sequence: Synthetic oligonucleotide
aacatctggtgatgtatg

SEQ ID NO: 3834 - DNA, 18 bp, Artificial Sequence
  Description of Artificial Sequence: Synthetic oligonucleotide
caacatctggtgatgtat

SEQ ID NO: 3835 - DNA, 18 bp, Artificial Sequence
  Description of Artificial Sequence: Synthetic oligonucleotide
tcaacatctggtgatgta

SEQ ID NO: 3836 - DNA, 18 bp, Artificial Sequence
  Description of Artificial Sequence: Synthetic oligonucleotide
atcaacatctggtgatgt

SEQ ID NO: 3837 - DNA, 18 bp, Artificial Sequence
  Description of Artificial Sequence: Synthetic oligonucleotide
tgaggcggtcaatttctt

SEQ ID NO: 3838 - DNA, 18 bp, Artificial Sequence
  Description of Artificial Sequence: Synthetic oligonucleotide
ttgaggcggtcaatttct

SEQ ID NO: 3839 - DNA, 18 bp, Artificial Sequence
  Description of Artificial Sequence: Synthetic oligonucleotide
attgaggcggtcaatttc

SEQ ID NO: 3840 - DNA, 18 bp, Artificial Sequence
  Description of Artificial Sequence: Synthetic oligonucleotide
cattgaggcggtcaattt

SEQ ID NO: 3841 - DNA, 18 bp, Artificial Sequence
  Description of Artificial Sequence: Synthetic oligonucleotide
tcattgaggcggtcaatt

SEQ ID NO: 3842 - DNA, 18 bp, Artificial Sequence
  Description of Artificial Sequence: Synthetic oligonucleotide
ctcattgaggcggtcaat

SEQ ID NO: 3843 - DNA, 18 bp, Artificial Sequence
  Description of Artificial Sequence: Synthetic oligonucleotide
cctcattgaggcggtcaa

SEQ ID NO: 3844 - DNA, 18 bp, Artificial Sequence
  Description of Artificial Sequence: Synthetic oligonucleotide
acctcattgaggcggtca

SEQ ID NO: 3845 - DNA, 18 bp, Artificial Sequence
  Description of Artificial Sequence: Synthetic oligonucleotide
tgtgtaatgtaatttgac

SEQ ID NO: 3846 - DNA, 18 bp, Artificial Sequence
  Description of Artificial Sequence: Synthetic oligonucleotide
atgtgtaatgtaatttga

SEQ ID NO: 3847 - DNA, 18 bp, Artificial Sequence
  Description of Artificial Sequence: Synthetic oligonucleotide
tatgtgtaatgtaatttg

SEQ ID NO: 3848 - DNA, 18 bp, Artificial Sequence
  Description of Artificial Sequence: Synthetic oligonucleotide
ttatgtgtaatgtaattt

SEQ ID NO: 3849 - DNA, 18 bp, Artificial Sequence
  Description of Artificial Sequence: Synthetic oligonucleotide
tttatgtgtaatgtaatt

SEQ ID NO: 3850 - DNA, 18 bp, Artificial Sequence
  Description of Artificial Sequence: Synthetic oligonucleotide
gtttatgtgtaatgtaat

SEQ ID NO: 3851 - DNA, 18 bp, Artificial Sequence
  Description of Artificial Sequence: Synthetic oligonucleotide
cgtttatgtgtaatgtaa

SEQ ID NO: 3852 - DNA, 18 bp, Artificial Sequence
  Description of Artificial Sequence: Synthetic oligonucleotide
aagggagtgaggcttgta

SEQ ID NO: 3853 - DNA, 18 bp, Artificial Sequence
  Description of Artificial Sequence: Synthetic oligonucleotide
aaagggagtgaggcttgt

SEQ ID NO: 3854 - DNA, 18 bp, Artificial Sequence
  Description of Artificial Sequence: Synthetic oligonucleotide
gaaagggagtgaggcttg

SEQ ID NO: 3855 - DNA, 18 bp, Artificial Sequence
  Description of Artificial Sequence: Synthetic oligonucleotide
cgaaagggagtgaggctt

SEQ ID NO: 3856 - DNA, 18 bp, Artificial Sequence
  Description of Artificial Sequence: Synthetic oligonucleotide
ccgaaagggagtgaggct

SEQ ID NO: 3857 - DNA, 18 bp, Artificial Sequence
  Description of Artificial Sequence: Synthetic oligonucleotide
tccgaaagggagtgaggc

SEQ ID NO: 3858 - DNA, 18 bp, Artificial Sequence
  Description of Artificial Sequence: Synthetic oligonucleotide
atccgaaagggagtgagg

SEQ ID NO: 3859 - DNA, 18 bp, Artificial Sequence
  Description of Artificial Sequence: Synthetic oligonucleotide
catccgaaagggagtgag

SEQ ID NO: 3860 - DNA, 18 bp, Artificial Sequence
  Description of Artificial Sequence: Synthetic oligonucleotide
ccatccgaaagggagtga

SEQ ID NO: 3861 - DNA, 18 bp, Artificial Sequence
  Description of Artificial Sequence: Synthetic oligonucleotide
gccatccgaaagggagtg

SEQ ID NO: 3862 - DNA, 18 bp, Artificial Sequence
  Description of Artificial Sequence: Synthetic oligonucleotide
agccatccgaaagggagt

SEQ ID NO: 3863 - DNA, 18 bp, Artificial Sequence
  Description of Artificial Sequence: Synthetic oligonucleotide
aagccatccgaaagggag

SEQ ID NO: 3864 - DNA, 18 bp, Artificial Sequence
  Description of Artificial Sequence: Synthetic oligonucleotide
gctagtagtcgtcgtcgg

SEQ ID NO: 3865 - DNA, 18 bp, Artificial Sequence
  Description of Artificial Sequence: Synthetic oligonucleotide
cgctagtagtcgtcgtcg

SEQ ID NO: 3866 - DNA, 18 bp, Artificial Sequence
  Description of Artificial Sequence: Synthetic oligonucleotide
acgctagtagtcgtcgtc

SEQ ID NO: 3867 - DNA, 18 bp, Artificial Sequence
  Description of Artificial Sequence: Synthetic oligonucleotide
cacgctagtagtcgtcgt

SEQ ID NO: 3868 - DNA, 18 bp, Artificial Sequence
  Description of Artificial Sequence: Synthetic oligonucleotide
gcacgctagtagtcgtcg

SEQ ID NO: 3869 - DNA, 18 bp, Artificial Sequence
  Description of Artificial Sequence: Synthetic oligonucleotide
ggcacgctagtagtcgtc

SEQ ID NO: 3870 - DNA, 18 bp, Artificial Sequence
  Description of Artificial Sequence: Synthetic oligonucleotide
aggcacgctagtagtcgt

SEQ ID NO: 3871 - DNA, 18 bp, Artificial Sequence
  Description of Artificial Sequence: Synthetic oligonucleotide
aaggcacgctagtagtcg

SEQ ID NO: 3872 - DNA, 18 bp, Artificial Sequence
  Description of Artificial Sequence: Synthetic oligonucleotide
aaaggcacgctagtagtc

SEQ ID NO: 3873 - DNA, 18 bp, Artificial Sequence
  Description of Artificial Sequence: Synthetic oligonucleotide
caaaggcacgctagtagt

SEQ ID NO: 3874 - DNA, 18 bp, Artificial Sequence
  Description of Artificial Sequence: Synthetic oligonucleotide
acaaaggcacgctagtag

SEQ ID NO: 3875 - DNA, 18 bp, Artificial Sequence
  Description of Artificial Sequence: Synthetic oligonucleotide
tacaaaggcacgctagta

SEQ ID NO: 3876 - DNA, 18 bp, Artificial Sequence
  Description of Artificial Sequence: Synthetic oligonucleotide
ttacaaaggcacgctagt

SEQ ID NO: 3877 - DNA, 18 bp, Artificial Sequence
  Description of Artificial Sequence: Synthetic oligonucleotide
cttacaaaggcacgctag

SEQ ID NO: 3878 - DNA, 18 bp, Artificial Sequence
  Description of Artificial Sequence: Synthetic oligonucleotide
gcttacaaaggcacgcta

SEQ ID NO: 3879 - DNA, 18 bp, Artificial Sequence
  Description of Artificial Sequence: Synthetic oligonucleotide
tgcttacaaaggcacgct

SEQ ID NO: 3880 - DNA, 18 bp, Artificial Sequence
  Description of Artificial Sequence: Synthetic oligonucleotide
gtgcttacaaaggcacgc

SEQ ID NO: 3881 - DNA, 18 bp, Artificial Sequence
  Description of Artificial Sequence: Synthetic oligonucleotide
tgtgcttacaaaggcacg

SEQ ID NO: 3882 - DNA, 18 bp, Artificial Sequence
  Description of Artificial Sequence: Synthetic oligonucleotide
ttgtgcttacaaaggcac

SEQ ID NO: 3883 - DNA, 18 bp, Artificial Sequence
  Description of Artificial Sequence: Synthetic oligonucleotide
cttgtgcttacaaaggca

SEQ ID NO: 3884 - DNA, 18 bp, Artificial Sequence
  Description of Artificial Sequence: Synthetic oligonucleotide
tacataagttcgtactca

SEQ ID NO: 3885 - DNA, 18 bp, Artificial Sequence
  Description of Artificial Sequence: Synthetic oligonucleotide
gtacataagttcgtactc

SEQ ID NO: 3886 - DNA, 18 bp, Artificial Sequence
  Description of Artificial Sequence: Synthetic oligonucleotide
agtacataagttcgtact

SEQ ID NO: 3887 - DNA, 18 bp, Artificial Sequence
  Description of Artificial Sequence: Synthetic oligonucleotide
gagtacataagttcgtac

SEQ ID NO: 3888 - DNA, 18 bp, Artificial Sequence
  Description of Artificial Sequence: Synthetic oligonucleotide
tgagtacataagttcgta

SEQ ID NO: 3889 - DNA, 18 bp, Artificial Sequence
  Description of Artificial Sequence: Synthetic oligonucleotide
atgagtacataagttcgt

SEQ ID NO: 3890 - DNA, 18 bp, Artificial Sequence
  Description of Artificial Sequence: Synthetic oligonucleotide
aatgagtacataagttcg

SEQ ID NO: 3891 - DNA, 18 bp, Artificial Sequence
  Description of Artificial Sequence: Synthetic oligonucleotide
gaatgagtacataagttc

SEQ ID NO: 3892 - DNA, 18 bp, Artificial Sequence
  Description of Artificial Sequence: Synthetic oligonucleotide
cgaatgagtacataagtt

SEQ ID NO: 3893 - DNA, 18 bp, Artificial Sequence
  Description of Artificial Sequence: Synthetic oligonucleotide
acgaatgagtacataagt

SEQ ID NO: 3894 - DNA, 18 bp, Artificial Sequence
  Description of Artificial Sequence: Synthetic oligonucleotide
aacgaatgagtacataag

SEQ ID NO: 3895 - DNA, 18 bp, Artificial Sequence
  Description of Artificial Sequence: Synthetic oligonucleotide
aaacgaatgagtacataa

SEQ ID NO: 3896 - DNA, 18 bp, Artificial Sequence
  Description of Artificial Sequence: Synthetic oligonucleotide
gaaacgaatgagtacata

SEQ ID NO: 3897 - DNA, 18 bp, Artificial Sequence
  Description of Artificial Sequence: Synthetic oligonucleotide
cgaaacgaatgagtacat

SEQ ID NO: 3898 - DNA, 18 bp, Artificial Sequence
  Description of Artificial Sequence: Synthetic oligonucleotide
ccgaaacgaatgagtaca

SEQ ID NO: 3899 - DNA, 18 bp, Artificial Sequence
  Description of Artificial Sequence: Synthetic oligonucleotide
tccgaaacgaatgagtac

SEQ ID NO: 3900 - DNA, 18 bp, Artificial Sequence
  Description of Artificial Sequence: Synthetic oligonucleotide
ttccgaaacgaatgagta

SEQ ID NO: 3901 - DNA, 18 bp, Artificial Sequence
  Description of Artificial Sequence: Synthetic oligonucleotide
cttccgaaacgaatgagt

SEQ ID NO: 3902 - DNA, 18 bp, Artificial Sequence
  Description of Artificial Sequence: Synthetic oligonucleotide
tcttccgaaacgaatgag

SEQ ID NO: 3903 - DNA, 18 bp, Artificial Sequence
  Description of Artificial Sequence: Synthetic oligonucleotide
aactattaacgtacctgt

SEQ ID NO: 3904 - DNA, 18 bp, Artificial Sequence
  Description of Artificial Sequence: Synthetic oligonucleotide
taactattaacgtacctg

SEQ ID NO: 3905 - DNA, 18 bp, Artificial Sequence
  Description of Artificial Sequence: Synthetic oligonucleotide
ttaactattaacgtacct

SEQ ID NO: 3906 - DNA, 18 bp, Artificial Sequence
  Description of Artificial Sequence: Synthetic oligonucleotide
attaactattaacgtacc

SEQ ID NO: 3907 - DNA, 18 bp, Artificial Sequence
  Description of Artificial Sequence: Synthetic oligonucleotide
tattaactattaacgtac

SEQ ID NO: 3908 - DNA, 18 bp, Artificial Sequence
  Description of Artificial Sequence: Synthetic oligonucleotide
ctattaactattaacgta

SEQ ID NO: 3909 - DNA, 18 bp, Artificial Sequence
  Description of Artificial Sequence: Synthetic oligonucleotide
gctattaactattaacgt

SEQ ID NO: 3910 - DNA, 18 bp, Artificial Sequence
  Description of Artificial Sequence: Synthetic oligonucleotide
cgctattaactattaacg

SEQ ID NO: 3911 - DNA, 18 bp, Artificial Sequence
  Description of Artificial Sequence: Synthetic oligonucleotide
acgctattaactattaac

SEQ ID NO: 3912 - DNA, 18 bp, Artificial Sequence
  Description of Artificial Sequence: Synthetic oligonucleotide
tacgctattaactattaa

SEQ ID NO: 3913 - DNA, 18 bp, Artificial Sequence
  Description of Artificial Sequence: Synthetic oligonucleotide
gtacgctattaactatta

SEQ ID NO: 3914 - DNA, 18 bp, Artificial Sequence
  Description of Artificial Sequence: Synthetic oligonucleotide
agtacgctattaactatt

SEQ ID NO: 3915 - DNA, 18 bp, Artificial Sequence
  Description of Artificial Sequence: Synthetic oligonucleotide
aagtacgctattaactat

SEQ ID NO: 3916 - DNA, 18 bp, Artificial Sequence
  Description of Artificial Sequence: Synthetic oligonucleotide
gaagtacgctattaacta

SEQ ID NO: 3917 - DNA, 18 bp, Artificial Sequence
  Description of Artificial Sequence: Synthetic oligonucleotide
agaagtacgctattaact

SEQ ID NO: 3918 - DNA, 18 bp, Artificial Sequence
  Description of Artificial Sequence: Synthetic oligonucleotide
aagaagtacgctattaac

SEQ ID NO: 3919 - DNA, 18 bp, Artificial Sequence
  Description of Artificial Sequence: Synthetic oligonucleotide
aaagaagtacgctattaa

SEQ ID NO: 3920 - DNA, 18 bp, Artificial Sequence
  Description of Artificial Sequence: Synthetic oligonucleotide
aaaagaagtacgctatta

SEQ ID NO: 3921 - DNA, 18 bp, Artificial Sequence
  Description of Artificial Sequence: Synthetic oligonucleotide
aaaaagaagtacgctatt

SEQ ID NO: 3922 - DNA, 18 bp, Artificial Sequence
  Description of Artificial Sequence: Synthetic oligonucleotide
gaaaaagaagtacgctat

SEQ ID NO: 3923 - DNA, 18 bp, Artificial Sequence
  Description of Artificial Sequence: Synthetic oligonucleotide
agaaaaagaagtacgcta

SEQ ID NO: 3924 - DNA, 18 bp, Artificial Sequence
  Description of Artificial Sequence: Synthetic oligonucleotide
aagaaaaagaagtacgct

SEQ ID NO: 3925 - DNA, 18 bp, Artificial Sequence
  Description of Artificial Sequence: Synthetic oligonucleotide
caagaaaaagaagtacgc

SEQ ID NO: 3926 - DNA, 18 bp, Artificial Sequence
  Description of Artificial Sequence: Synthetic oligonucleotide
gcaagaaaaagaagtacg

SEQ ID NO: 3927 - DNA, 18 bp, Artificial Sequence
  Description of Artificial Sequence: Synthetic oligonucleotide
agcaagaaaaagaagtac

SEQ ID NO: 3928 - DNA, 18 bp, Artificial Sequence
  Description of Artificial Sequence: Synthetic oligonucleotide
aagcaagaaaaagaagta

SEQ ID NO: 3929 - DNA, 18 bp, Artificial Sequence
  Description of Artificial Sequence: Synthetic oligonucleotide
aaagcaagaaaaagaagt

SEQ ID NO: 3930 - DNA, 18 bp, Artificial Sequence
  Description of Artificial Sequence: Synthetic oligonucleotide
gaaagcaagaaaaagaag

SEQ ID NO: 3931 - DNA, 18 bp, Artificial Sequence
  Description of Artificial Sequence: Synthetic oligonucleotide
cgaaagcaagaaaaagaa

SEQ ID NO: 3932 - DNA, 18 bp, Artificial Sequence
  Description of Artificial Sequence: Synthetic oligonucleotide
acgaaagcaagaaaaaga

SEQ ID NO: 3933 - DNA, 18 bp, Artificial Sequence
  Description of Artificial Sequence: Synthetic oligonucleotide
cacgaaagcaagaaaaag

SEQ ID NO: 3934 - DNA, 18 bp, Artificial Sequence
  Description of Artificial Sequence: Synthetic oligonucleotide
ccacgaaagcaagaaaaa

SEQ ID NO: 3935 - DNA, 18 bp, Artificial Sequence
  Description of Artificial Sequence: Synthetic oligonucleotide
accacgaaagcaagaaaa

SEQ ID NO: 3936 - DNA, 18 bp, Artificial Sequence
  Description of Artificial Sequence: Synthetic oligonucleotide
taccacgaaagcaagaaa

SEQ ID NO: 3937 - DNA, 18 bp, Artificial Sequence
  Description of Artificial Sequence: Synthetic oligonucleotide
ataccacgaaagcaagaa

SEQ ID NO: 3938 - DNA, 18 bp, Artificial Sequence
  Description of Artificial Sequence: Synthetic oligonucleotide
aataccacgaaagcaaga

SEQ ID NO: 3939 - DNA, 18 bp, Artificial Sequence
  Description of Artificial Sequence: Synthetic oligonucleotide
gaataccacgaaagcaag

SEQ ID NO: 3940 - DNA, 18 bp, Artificial Sequence
  Description of Artificial Sequence: Synthetic oligonucleotide
agaataccacgaaagcaa

SEQ ID NO: 3941 - DNA, 18 bp, Artificial Sequence
  Description of Artificial Sequence: Synthetic oligonucleotide
aagaataccacgaaagca

SEQ ID NO: 3942 - DNA, 18 bp, Artificial Sequence
  Description of Artificial Sequence: Synthetic oligonucleotide
caagaataccacgaaagc

SEQ ID NO: 3943 - DNA, 18 bp, Artificial Sequence
  Description of Artificial Sequence: Synthetic oligonucleotide
gcaagaataccacgaaag

SEQ ID NO: 3944 - DNA, 18 bp, Artificial Sequence
  Description of Artificial Sequence: Synthetic oligonucleotide
agcaagaataccacgaaa

SEQ ID NO: 3945 - DNA, 18 bp, Artificial Sequence
  Description of Artificial Sequence: Synthetic oligonucleotide
tagcaagaataccacgaa

SEQ ID NO: 3946 - DNA, 18 bp, Artificial Sequence
  Description of Artificial Sequence: Synthetic oligonucleotide
ctagcaagaataccacga

SEQ ID NO: 3947 - DNA, 18 bp, Artificial Sequence
  Description of Artificial Sequence: Synthetic oligonucleotide
actagcaagaataccacg

SEQ ID NO: 3948 - DNA, 18 bp, Artificial Sequence
  Description of Artificial Sequence: Synthetic oligonucleotide
agtaaggatggctagtgt

SEQ ID NO: 3949 - DNA, 18 bp, Artificial Sequence
  Description of Artificial Sequence: Synthetic oligonucleotide
cagtaaggatggctagtg

SEQ ID NO: 3950 - DNA, 18 bp, Artificial Sequence
  Description of Artificial Sequence: Synthetic oligonucleotide
gcagtaaggatggctagt

SEQ ID NO: 3951 - DNA, 18 bp, Artificial Sequence
  Description of Artificial Sequence: Synthetic oligonucleotide
cgcagtaaggatggctag

SEQ ID NO: 3952 - DNA, 18 bp, Artificial Sequence
  Description of Artificial Sequence: Synthetic oligonucleotide
gcgcagtaaggatggcta

SEQ ID NO: 3953 - DNA, 18 bp, Artificial Sequence
  Description of Artificial Sequence: Synthetic oligonucleotide
agcgcagtaaggatggct

SEQ ID NO: 3954 - DNA, 18 bp, Artificial Sequence
  Description of Artificial Sequence: Synthetic oligonucleotide
aagcgcagtaaggatggc

SEQ ID NO: 3955 - DNA, 18 bp, Artificial Sequence
  Description of Artificial Sequence: Synthetic oligonucleotide
gaagcgcagtaaggatgg

SEQ ID NO: 3956 - DNA, 18 bp, Artificial Sequence
  Description of Artificial Sequence: Synthetic oligonucleotide
cgaagcgcagtaaggatg

SEQ ID NO: 3957 - DNA, 18 bp, Artificial Sequence
  Description of Artificial Sequence: Synthetic oligonucleotide
tcgaagcgcagtaaggat

SEQ ID NO: 3958 - DNA, 18 bp, Artificial Sequence
  Description of Artificial Sequence: Synthetic oligonucleotide
atcgaagcgcagtaagga

SEQ ID NO: 3959 - DNA, 18 bp, Artificial Sequence
  Description of Artificial Sequence: Synthetic oligonucleotide
aatcgaagcgcagtaagg

SEQ ID NO: 3960 - DNA, 18 bp, Artificial Sequence
  Description of Artificial Sequence: Synthetic oligonucleotide
caatcgaagcgcagtaag

SEQ ID NO: 3961 - DNA, 18 bp, Artificial Sequence
  Description of Artificial Sequence: Synthetic oligonucleotide
acaatcgaagcgcagtaa

SEQ ID NO: 3962 - DNA, 18 bp, Artificial Sequence
  Description of Artificial Sequence: Synthetic oligonucleotide
cacaatcgaagcgcagta

SEQ ID NO: 3963 - DNA, 18 bp, Artificial Sequence
  Description of Artificial Sequence: Synthetic oligonucleotide
acacaatcgaagcgcagt

SEQ ID NO: 3964 - DNA, 18 bp, Artificial Sequence
  Description of Artificial Sequence: Synthetic oligonucleotide
cacacaatcgaagcgcag

SEQ ID NO: 3965 - DNA, 18 bp, Artificial Sequence
  Description of Artificial Sequence: Synthetic oligonucleotide
gcacacaatcgaagcgca

SEQ ID NO: 3966 - DNA, 18 bp, Artificial Sequence
  Description of Artificial Sequence: Synthetic oligonucleotide
cgcacacaatcgaagcgc

SEQ ID NO: 3967 - DNA, 18 bp, Artificial Sequence
  Description of Artificial Sequence: Synthetic oligonucleotide
acgcacacaatcgaagcg

SEQ ID NO: 3968 - DNA, 18 bp, Artificial Sequence
  Description of Artificial Sequence: Synthetic oligonucleotide
tacgcacacaatcgaagc

SEQ ID NO: 3969 - DNA, 18 bp, Artificial Sequence
  Description of Artificial Sequence: Synthetic oligonucleotide
gtacgcacacaatcgaag

SEQ ID NO: 3970 - DNA, 18 bp, Artificial Sequence
  Description of Artificial Sequence: Synthetic oligonucleotide
agtacgcacacaatcgaa

SEQ ID NO: 3971 - DNA, 18 bp, Artificial Sequence
  Description of Artificial Sequence: Synthetic oligonucleotide
cagtacgcacacaatcga

SEQ ID NO: 3972 - DNA, 18 bp, Artificial Sequence
  Description of Artificial Sequence: Synthetic oligonucleotide
gcagtacgcacacaatcg

SEQ ID NO: 3973 - DNA, 18 bp, Artificial Sequence
  Description of Artificial Sequence: Synthetic oligonucleotide
agcagtacgcacacaatc

SEQ ID NO: 3974 - DNA, 18 bp, Artificial Sequence
  Description of Artificial Sequence: Synthetic oligonucleotide
cagcagtacgcacacaat

SEQ ID NO: 3975 - DNA, 18 bp, Artificial Sequence
  Description of Artificial Sequence: Synthetic oligonucleotide
gcagcagtacgcacacaa

SEQ ID NO: 3976 - DNA, 18 bp, Artificial Sequence
  Description of Artificial Sequence: Synthetic oligonucleotide
tgcagcagtacgcacaca

SEQ ID NO: 3977 - DNA, 18 bp, Artificial Sequence
  Description of Artificial Sequence: Synthetic oligonucleotide
ttgcagcagtacgcacac

SEQ ID NO: 3978 - DNA, 18 bp, Artificial Sequence
  Description of Artificial Sequence: Synthetic oligonucleotide
attgcagcagtacgcaca

SEQ ID NO: 3979 - DNA, 18 bp, Artificial Sequence
  Description of Artificial Sequence: Synthetic oligonucleotide
tattgcagcagtacgcac

SEQ ID NO: 3980 - DNA, 18 bp, Artificial Sequence
  Description of Artificial Sequence: Synthetic oligonucleotide
atattgcagcagtacgca

SEQ ID NO: 3981 - DNA, 18 bp, Artificial Sequence
  Description of Artificial Sequence: Synthetic oligonucleotide
aatattgcagcagtacgc

SEQ ID NO: 3982 - DNA, 18 bp, Artificial Sequence
  Description of Artificial Sequence: Synthetic oligonucleotide
caatattgcagcagtacg

SEQ ID NO: 3983 - DNA, 18 bp, Artificial Sequence
  Description of Artificial Sequence: Synthetic oligonucleotide
acaatattgcagcagtac

SEQ ID NO: 3984 - DNA, 18 bp, Artificial Sequence
  Description of Artificial Sequence: Synthetic oligonucleotide
aacaatattgcagcagta

SEQ ID NO: 3985 - DNA, 18 bp, Artificial Sequence
  Description of Artificial Sequence: Synthetic oligonucleotide
taacaatattgcagcagt

SEQ ID NO: 3986 - DNA, 18 bp, Artificial Sequence
  Description of Artificial Sequence: Synthetic oligonucleotide
ttaacaatattgcagcag

SEQ ID NO: 3987 - DNA, 18 bp, Artificial Sequence
  Description of Artificial Sequence: Synthetic oligonucleotide
gttaacaatattgcagca

SEQ ID NO: 3988 - DNA, 18 bp, Artificial Sequence
  Description of Artificial Sequence: Synthetic oligonucleotide
cgttaacaatattgcagc

SEQ ID NO: 3989 - DNA, 18 bp, Artificial Sequence
  Description of Artificial Sequence: Synthetic oligonucleotide
acgttaacaatattgcag

SEQ ID NO: 3990 - DNA, 18 bp, Artificial Sequence
  Description of Artificial Sequence: Synthetic oligonucleotide
cacgttaacaatattgca

SEQ ID NO: 3991 - DNA, 18 bp, Artificial Sequence
  Description of Artificial Sequence: Synthetic oligonucleotide
tcacgttaacaatattgc

SEQ ID NO: 3992 - DNA, 18 bp, Artificial Sequence
  Description of Artificial Sequence: Synthetic oligonucleotide
ctcacgttaacaatattg

SEQ ID NO: 3993 - DNA, 18 bp, Artificial Sequence
  Description of Artificial Sequence: Synthetic oligonucleotide
actcacgttaacaatatt

SEQ ID NO: 3994 - DNA, 18 bp, Artificial Sequence
  Description of Artificial Sequence: Synthetic oligonucleotide
ccagaagatcaggaactc

SEQ ID NO: 3995 - DNA, 18 bp, Artificial Sequence
  Description of Artificial Sequence: Synthetic oligonucleotide
accagaagatcaggaact

SEQ ID NO: 3996 - DNA, 18 bp, Artificial Sequence
  Description of Artificial Sequence: Synthetic oligonucleotide
gaccagaagatcaggaac

SEQ ID NO: 3997 - DNA, 18 bp, Artificial Sequence
  Description of Artificial Sequence: Synthetic oligonucleotide
agaccagaagatcaggaa

SEQ ID NO: 3998 - DNA, 18 bp, Artificial Sequence
  Description of Artificial Sequence: Synthetic oligonucleotide
tagaccagaagatcagga

SEQ ID NO: 3999 - DNA, 18 bp, Artificial Sequence
  Description of Artificial Sequence: Synthetic oligonucleotide
ttagaccagaagatcagg

SEQ ID NO: 4000 - DNA, 18 bp, Artificial Sequence
  Description of Artificial Sequence: Synthetic oligonucleotide
tttagaccagaagatcag

SEQ ID NO: 4001 - DNA, 18 bp, Artificial Sequence
  Description of Artificial Sequence: Synthetic oligonucleotide
gtttagaccagaagatca

SEQ ID NO: 4002 - DNA, 18 bp, Artificial Sequence
  Description of Artificial Sequence: Synthetic oligonucleotide
cgtttagaccagaagatc

SEQ ID NO: 4003 - DNA, 18 bp, Artificial Sequence
  Description of Artificial Sequence: Synthetic oligonucleotide
tcgtttagaccagaagat

SEQ ID NO: 4004 - DNA, 18 bp, Artificial Sequence
  Description of Artificial Sequence: Synthetic oligonucleotide
ttcgtttagaccagaaga

SEQ ID NO: 4005 - DNA, 18 bp, Artificial Sequence
  Description of Artificial Sequence: Synthetic oligonucleotide
gttcgtttagaccagaag

SEQ ID NO: 4006 - DNA, 18 bp, Artificial Sequence
  Description of Artificial Sequence: Synthetic oligonucleotide
agttcgtttagaccagaa

SEQ ID NO: 4007 - DNA, 18 bp, Artificial Sequence
  Description of Artificial Sequence: Synthetic oligonucleotide
tagttcgtttagaccaga

SEQ ID NO: 4008 - DNA, 18 bp, Artificial Sequence
  Description of Artificial Sequence: Synthetic oligonucleotide
ttagttcgtttagaccag

SEQ ID NO: 4009 - DNA, 18 bp, Artificial Sequence
  Description of Artificial Sequence: Synthetic oligonucleotide
ttaaagttccaaacagaa

SEQ ID NO: 4010 - DNA, 18 bp, Artificial Sequence
  Description of Artificial Sequence: Synthetic oligonucleotide
tactaggttccattgttc

SEQ ID NO: 4011 - DNA, 18 bp, Artificial Sequence
  Description of Artificial Sequence: Synthetic oligonucleotide
ttactaggttccattgtt

SEQ ID NO: 4012 - DNA, 18 bp, Artificial Sequence
  Description of Artificial Sequence: Synthetic oligonucleotide
attactaggttccattgt

SEQ ID NO: 4013 - DNA, 18 bp, Artificial Sequence
  Description of Artificial Sequence: Synthetic oligonucleotide
tattactaggttccattg

SEQ ID NO: 4014 - DNA, 18 bp, Artificial Sequence
  Description of Artificial Sequence: Synthetic oligonucleotide
ctattactaggttccatt

SEQ ID NO: 4015 - DNA, 18 bp, Artificial Sequence
  Description of Artificial Sequence: Synthetic oligonucleotide
cctattactaggttccat

SEQ ID NO: 4016 - DNA, 18 bp, Artificial Sequence
  Description of Artificial Sequence: Synthetic oligonucleotide
acctattactaggttcca

SEQ ID NO: 4017 - DNA, 18 bp, Artificial Sequence
  Description of Artificial Sequence: Synthetic oligonucleotide
aacctattactaggttcc

SEQ ID NO: 4018 - DNA, 18 bp, Artificial Sequence
  Description of Artificial Sequence: Synthetic oligonucleotide
aaacctattactaggttc

SEQ ID NO: 4019 - DNA, 18 bp, Artificial Sequence
  Description of Artificial Sequence: Synthetic oligonucleotide
gaaacctattactaggtt

SEQ ID NO: 4020 - DNA, 18 bp, Artificial Sequence
  Description of Artificial Sequence: Synthetic oligonucleotide
aagcgttcgtgatgtagc

SEQ ID NO: 4021 - DNA, 18 bp, Artificial Sequence
  Description of Artificial Sequence: Synthetic oligonucleotide
aaagcgttcgtgatgtag

SEQ ID NO: 4022 - DNA, 18 bp, Artificial Sequence
  Description of Artificial Sequence: Synthetic oligonucleotide
gaaagcgttcgtgatgta

SEQ ID NO: 4023 - DNA, 18 bp, Artificial Sequence
  Description of Artificial Sequence: Synthetic oligonucleotide
agaaagcgttcgtgatgt

SEQ ID NO: 4024 - DNA, 18 bp, Artificial Sequence
  Description of Artificial Sequence: Synthetic oligonucleotide
aagaaagcgttcgtgatg

SEQ ID NO: 4025 - DNA, 18 bp, Artificial Sequence
  Description of Artificial Sequence: Synthetic oligonucleotide
taagaaagcgttcgtgat

SEQ ID NO: 4026 - DNA, 18 bp, Artificial Sequence
  Description of Artificial Sequence: Synthetic oligonucleotide
ataagaaagcgttcgtga

SEQ ID NO: 4027 - DNA, 18 bp, Artificial Sequence
  Description of Artificial Sequence: Synthetic oligonucleotide
aataagaaagcgttcgtg

SEQ ID NO: 4028 - DNA, 18 bp, Artificial Sequence
  Description of Artificial Sequence: Synthetic oligonucleotide
taataagaaagcgttcgt

SEQ ID NO: 4029 - DNA, 18 bp, Artificial Sequence
  Description of Artificial Sequence: Synthetic oligonucleotide
gtaataagaaagcgttcg

SEQ ID NO: 4030 - DNA, 18 bp, Artificial Sequence
  Description of Artificial Sequence: Synthetic oligonucleotide
tgtaataagaaagcgttc

SEQ ID NO: 4031 - DNA, 18 bp, Artificial Sequence
  Description of Artificial Sequence: Synthetic oligonucleotide
ttgtaataagaaagcgtt

SEQ ID NO: 4032 - DNA, 18 bp, Artificial Sequence
  Description of Artificial Sequence: Synthetic oligonucleotide
tttgtaataagaaagcgt

SEQ ID NO: 4033 - DNA, 18 bp, Artificial Sequence
  Description of Artificial Sequence: Synthetic oligonucleotide
atttgtaataagaaagcg

SEQ ID NO: 4034 - DNA, 18 bp, Artificial Sequence
  Description of Artificial Sequence: Synthetic oligonucleotide
aatttgtaataagaaagc

SEQ ID NO: 4035 - DNA, 18 bp, Artificial Sequence
  Description of Artificial Sequence: Synthetic oligonucleotide
gtatgcagcaaaacctga

SEQ ID NO: 4036 - DNA, 18 bp, Artificial Sequence
  Description of Artificial Sequence: Synthetic oligonucleotide
tgtatgcagcaaaacctg

SEQ ID NO: 4037 - DNA, 18 bp, Artificial Sequence
  Description of Artificial Sequence: Synthetic oligonucleotide
tgttgtcacttactgtac

SEQ ID NO: 4038 - DNA, 18 bp, Artificial Sequence
  Description of Artificial Sequence: Synthetic oligonucleotide
ctgttgtcacttactgta

SEQ ID NO: 4039 - DNA, 18 bp, Artificial Sequence
  Description of Artificial Sequence: Synthetic oligonucleotide
tctgttgtcacttactgt

SEQ ID NO: 4040 - DNA, 18 bp, Artificial Sequence
  Description of Artificial Sequence: Synthetic oligonucleotide
atctgttgtcacttactg

SEQ ID NO: 4041 - DNA, 18 bp, Artificial Sequence
  Description of Artificial Sequence: Synthetic oligonucleotide
catctgttgtcacttact

SEQ ID NO: 4042 - DNA, 18 bp, Artificial Sequence
  Description of Artificial Sequence: Synthetic oligonucleotide
acatctgttgtcacttac

SEQ ID NO: 4043 - DNA, 18 bp, Artificial Sequence
  Description of Artificial Sequence: Synthetic oligonucleotide
aacatctgttgtcactta

SEQ ID NO: 4044 - DNA, 18 bp, Artificial Sequence
  Description of Artificial Sequence: Synthetic oligonucleotide
aaacatctgttgtcactt

SEQ ID NO: 4045 - DNA, 18 bp, Artificial Sequence
  Description of Artificial Sequence: Synthetic oligonucleotide
gaaacatctgttgtcact

SEQ ID NO: 4046 - DNA, 18 bp, Artificial Sequence
  Description of Artificial Sequence: Synthetic oligonucleotide
tgaaacatctgttgtcac

SEQ ID NO: 4047 - DNA, 18 bp, Artificial Sequence
  Description of Artificial Sequence: Synthetic oligonucleotide
atgaaacatctgttgtca

SEQ ID NO: 4048 - DNA, 18 bp, Artificial Sequence
  Description of Artificial Sequence: Synthetic oligonucleotide
gatgaaacatctgttgtc

SEQ ID NO: 4049 - DNA, 18 bp, Artificial Sequence
  Description of Artificial Sequence: Synthetic oligonucleotide
agatgaaacatctgttgt

SEQ ID NO: 4050 - DNA, 18 bp, Artificial Sequence
  Description of Artificial Sequence: Synthetic oligonucleotide
tttcatgttcgtttaatc

SEQ ID NO: 4051 - DNA, 18 bp, Artificial Sequence
  Description of Artificial Sequence: Synthetic oligonucleotide
ttttcatgttcgtttaat

SEQ ID NO: 4052 - DNA, 18 bp, Artificial Sequence
  Description of Artificial Sequence: Synthetic oligonucleotide
attttcatgttcgtttaa

SEQ ID NO: 4053 - DNA, 18 bp, Artificial Sequence
  Description of Artificial Sequence: Synthetic oligonucleotide
aattttcatgttcgttta

SEQ ID NO: 4054 - DNA, 18 bp, Artificial Sequence
  Description of Artificial Sequence: Synthetic oligonucleotide
taattttcatgttcgttt

SEQ ID NO: 4055 - DNA, 18 bp, Artificial Sequence
  Description of Artificial Sequence: Synthetic oligonucleotide
ataattttcatgttcgtt

SEQ ID NO: 4056 - DNA, 18 bp, Artificial Sequence
  Description of Artificial Sequence: Synthetic oligonucleotide
aataattttcatgttcgt

SEQ ID NO: 4057 - DNA, 18 bp, Artificial Sequence
  Description of Artificial Sequence: Synthetic oligonucleotide
gaataattttcatgttcg

SEQ ID NO: 4058 - DNA, 18 bp, Artificial Sequence
  Description of Artificial Sequence: Synthetic oligonucleotide
agaataattttcatgttc

SEQ ID NO: 4059 - DNA, 18 bp, Artificial Sequence
  Description of Artificial Sequence: Synthetic oligonucleotide
tggtgaattgccctcgta

SEQ ID NO: 4060 - DNA, 18 bp, Artificial Sequence
  Description of Artificial Sequence: Synthetic oligonucleotide
atggtgaattgccctcgt

SEQ ID NO: 4061 - DNA, 18 bp, Artificial Sequence
  Description of Artificial Sequence: Synthetic oligonucleotide
aatggtgaattgccctcg

SEQ ID NO: 4062 - DNA, 18 bp, Artificial Sequence
  Description of Artificial Sequence: Synthetic oligonucleotide
aaatggtgaattgccctc

SEQ ID NO: 4063 - DNA, 18 bp, Artificial Sequence
  Description of Artificial Sequence: Synthetic oligonucleotide
gaaatggtgaattgccct

SEQ ID NO: 4064 - DNA, 18 bp, Artificial Sequence
  Description of Artificial Sequence: Synthetic oligonucleotide
tgaaatggtgaattgccc

SEQ ID NO: 4065 - DNA, 18 bp, Artificial Sequence
  Description of Artificial Sequence: Synthetic oligonucleotide
caaatagaagtcaattaa

SEQ ID NO: 4066 - DNA, 18 bp, Artificial Sequence
  Description of Artificial Sequence: Synthetic oligonucleotide
acaaatagaagtcaatta

SEQ ID NO: 4067 - DNA, 18 bp, Artificial Sequence
  Description of Artificial Sequence: Synthetic oligonucleotide
cacaaatagaagtcaatt

SEQ ID NO: 4068 - DNA, 18 bp, Artificial Sequence
  Description of Artificial Sequence: Synthetic oligonucleotide
gcacaaatagaagtcaat

SEQ ID NO: 4069 - DNA, 18 bp, Artificial Sequence
  Description of Artificial Sequence: Synthetic oligonucleotide
agcacaaatagaagtcaa

SEQ ID NO: 4070 - DNA, 18 bp, Artificial Sequence
  Description of Artificial Sequence: Synthetic oligonucleotide
aagcacaaatagaagtca

SEQ ID NO: 4071 - DNA, 18 bp, Artificial Sequence
  Description of Artificial Sequence: Synthetic oligonucleotide
aaagcacaaatagaagtc

SEQ ID NO: 4072 - DNA, 18 bp, Artificial Sequence
  Description of Artificial Sequence: Synthetic oligonucleotide
aaaagcacaaatagaagt

SEQ ID NO: 4073 - DNA, 18 bp, Artificial Sequence
  Description of Artificial Sequence: Synthetic oligonucleotide
aaaaagcacaaatagaag

SEQ ID NO: 4074 - DNA, 18 bp, Artificial Sequence
  Description of Artificial Sequence: Synthetic oligonucleotide
taaaaagcacaaatagaa

SEQ ID NO: 4075 - DNA, 18 bp, Artificial Sequence
  Description of Artificial Sequence: Synthetic oligonucleotide
ctaaaaagcacaaataga

SEQ ID NO: 4076 - DNA, 18 bp, Artificial Sequence
  Description of Artificial Sequence: Synthetic oligonucleotide
gctaaaaagcacaaatag

SEQ ID NO: 4077 - DNA, 18 bp, Artificial Sequence
  Description of Artificial Sequence: Synthetic oligonucleotide
ggctaaaaagcacaaata

SEQ ID NO: 4078 - DNA, 18 bp, Artificial Sequence
  Description of Artificial Sequence: Synthetic oligonucleotide
aggctaaaaagcacaaat

SEQ ID NO: 4079 - DNA, 18 bp, Artificial Sequence
  Description of Artificial Sequence: Synthetic oligonucleotide
aaggctaaaaagcacaaa

SEQ ID NO: 4080 - DNA, 18 bp, Artificial Sequence
  Description of Artificial Sequence: Synthetic oligonucleotide
aaaggctaaaaagcacaa

SEQ ID NO: 4081 - DNA, 18 bp, Artificial Sequence
  Description of Artificial Sequence: Synthetic oligonucleotide
gaaaggctaaaaagcaca

SEQ ID NO: 4082 - DNA, 18 bp, Artificial Sequence
  Description of Artificial Sequence: Synthetic oligonucleotide
agaaaggctaaaaagcac

SEQ ID NO: 4083 - DNA, 18 bp, Artificial Sequence
  Description of Artificial Sequence: Synthetic oligonucleotide
cagaaaggctaaaaagca

SEQ ID NO: 4084 - DNA, 18 bp, Artificial Sequence
  Description of Artificial Sequence: Synthetic oligonucleotide
gcagaaaggctaaaaagc

SEQ ID NO: 4085 - DNA, 18 bp, Artificial Sequence
  Description of Artificial Sequence: Synthetic oligonucleotide
agcagaaaggctaaaaag

SEQ ID NO: 4086 - DNA, 18 bp, Artificial Sequence
  Description of Artificial Sequence: Synthetic oligonucleotide
tagcagaaaggctaaaaa

SEQ ID NO: 4087 - DNA, 18 bp, Artificial Sequence
  Description of Artificial Sequence: Synthetic oligonucleotide
atagcagaaaggctaaaa

SEQ ID NO: 4088 - DNA, 18 bp, Artificial Sequence
  Description of Artificial Sequence: Synthetic oligonucleotide
aatagcagaaaggctaaa

SEQ ID NO: 4089 - DNA, 18 bp, Artificial Sequence
  Description of Artificial Sequence: Synthetic oligonucleotide
gaatagcagaaaggctaa

SEQ ID NO: 4090 - DNA, 18 bp, Artificial Sequence
  Description of Artificial Sequence: Synthetic oligonucleotide
ggaatagcagaaaggcta

SEQ ID NO: 4091 - DNA, 18 bp, Artificial Sequence
  Description of Artificial Sequence: Synthetic oligonucleotide
aggaatagcagaaaggct

SEQ ID NO: 4092 - DNA, 18 bp, Artificial Sequence
  Description of Artificial Sequence: Synthetic oligonucleotide
aaggaatagcagaaaggc

SEQ ID NO: 4093 - DNA, 18 bp, Artificial Sequence
  Description of Artificial Sequence: Synthetic oligonucleotide
caaggaatagcagaaagg

SEQ ID NO: 4094 - DNA, 18 bp, Artificial Sequence
  Description of Artificial Sequence: Synthetic oligonucleotide
acaaggaatagcagaaag

SEQ ID NO: 4095 - DNA, 18 bp, Artificial Sequence
  Description of Artificial Sequence: Synthetic oligonucleotide
aacaaggaatagcagaaa

SEQ ID NO: 4096 - DNA, 18 bp, Artificial Sequence
  Description of Artificial Sequence: Synthetic oligonucleotide
ccattatcagacatttta

SEQ ID NO: 4097 - DNA, 18 bp, Artificial Sequence
  Description of Artificial Sequence: Synthetic oligonucleotide
tccattatcagacatttt

SEQ ID NO: 4098 - DNA, 18 bp, Artificial Sequence
  Description of Artificial Sequence: Synthetic oligonucleotide
gtccattatcagacattt

SEQ ID NO: 4099 - DNA, 18 bp, Artificial Sequence
  Description of Artificial Sequence: Synthetic oligonucleotide
ggtccattatcagacatt

SEQ ID NO: 4100 - DNA, 18 bp, Artificial Sequence
  Description of Artificial Sequence: Synthetic oligonucleotide
gggtccattatcagacat

SEQ ID NO: 4101 - DNA, 18 bp, Artificial Sequence
  Description of Artificial Sequence: Synthetic oligonucleotide
ggggtccattatcagaca

SEQ ID NO: 4102 - DNA, 18 bp, Artificial Sequence
  Description of Artificial Sequence: Synthetic oligonucleotide
tggggtccattatcagac

SEQ ID NO: 4103 - DNA, 18 bp, Artificial Sequence
  Description of Artificial Sequence: Synthetic oligonucleotide
ttggggtccattatcaga

SEQ ID NO: 4104 - DNA, 18 bp, Artificial Sequence
  Description of Artificial Sequence: Synthetic oligonucleotide
tttggggtccattatcag

SEQ ID NO: 4105 - DNA, 18 bp, Artificial Sequence
  Description of Artificial Sequence: Synthetic oligonucleotide
ttttggggtccattatca

SEQ ID NO: 4106 - DNA, 18 bp, Artificial Sequence
  Description of Artificial Sequence: Synthetic oligonucleotide
attgggtaaaccttgggg

SEQ ID NO: 4107 - DNA, 18 bp, Artificial Sequence
  Description of Artificial Sequence: Synthetic oligonucleotide
tattgggtaaaccttggg

SEQ ID NO: 4108 - DNA, 18 bp, Artificial Sequence
  Description of Artificial Sequence: Synthetic oligonucleotide
ttattgggtaaaccttgg

SEQ ID NO: 4109 - DNA, 18 bp, Artificial Sequence
  Description of Artificial Sequence: Synthetic oligonucleotide
attattgggtaaaccttg

SEQ ID NO: 4110 - DNA, 18 bp, Artificial Sequence
  Description of Artificial Sequence: Synthetic oligonucleotide
tattattgggtaaacctt

SEQ ID NO: 4111 - DNA, 18 bp, Artificial Sequence
  Description of Artificial Sequence: Synthetic oligonucleotide
gtattattgggtaaacct

SEQ ID NO: 4112 - DNA, 18 bp, Artificial Sequence
  Description of Artificial Sequence: Synthetic oligonucleotide
agtattattgggtaaacc

SEQ ID NO: 4113 - DNA, 18 bp, Artificial Sequence
  Description of Artificial Sequence: Synthetic oligonucleotide
cagtattattgggtaaac

SEQ ID NO: 4114 - DNA, 18 bp, Artificial Sequence
  Description of Artificial Sequence: Synthetic oligonucleotide
gcagtattattgggtaaa

SEQ ID NO: 4115 - DNA, 18 bp, Artificial Sequence
  Description of Artificial Sequence: Synthetic oligonucleotide
cgcagtattattgggtaa

SEQ ID NO: 4116 - DNA, 18 bp, Artificial Sequence
  Description of Artificial Sequence: Synthetic oligonucleotide
acgcagtattattgggta

SEQ ID NO: 4117 - DNA, 18 bp, Artificial Sequence
  Description of Artificial Sequence: Synthetic oligonucleotide
gacgcagtattattgggt

SEQ ID NO: 4118 - DNA, 18 bp, Artificial Sequence
  Description of Artificial Sequence: Synthetic oligonucleotide
agacgcagtattattggg

SEQ ID NO: 4119 - DNA, 18 bp, Artificial Sequence
  Description of Artificial Sequence: Synthetic oligonucleotide
aagacgcagtattattgg

SEQ ID NO: 4120 - DNA, 18 bp, Artificial Sequence
  Description of Artificial Sequence: Synthetic oligonucleotide
caagacgcagtattattg

SEQ ID NO: 4121 - DNA, 18 bp, Artificial Sequence
  Description of Artificial Sequence: Synthetic oligonucleotide
ccaagacgcagtattatt

SEQ ID NO: 4122 - DNA, 18 bp, Artificial Sequence
  Description of Artificial Sequence: Synthetic oligonucleotide
accaagacgcagtattat

SEQ ID NO: 4123 - DNA, 18 bp, Artificial Sequence
  Description of Artificial Sequence: Synthetic oligonucleotide
aaccaagacgcagtatta

SEQ ID NO: 4124 - DNA, 18 bp, Artificial Sequence
  Description of Artificial Sequence: Synthetic oligonucleotide
gaaccaagacgcagtatt

SEQ ID NO: 4125 - DNA, 18 bp, Artificial Sequence
  Description of Artificial Sequence: Synthetic oligonucleotide
tgaaccaagacgcagtat

SEQ ID NO: 4126 - DNA, 18 bp, Artificial Sequence
  Description of Artificial Sequence: Synthetic oligonucleotide
gtgaaccaagacgcagta

SEQ ID NO: 4127 - DNA, 18 bp, Artificial Sequence
  Description of Artificial Sequence: Synthetic oligonucleotide
tagccaatttggtcatct

SEQ ID NO: 4128 - DNA, 18 bp, Artificial Sequence
  Description of Artificial Sequence: Synthetic oligonucleotide
gtagccaatttggtcatc

SEQ ID NO: 4129 - DNA, 18 bp, Artificial Sequence
  Description of Artificial Sequence: Synthetic oligonucleotide
agtagccaatttggtcat

SEQ ID NO: 4130 - DNA, 18 bp, Artificial Sequence
  Description of Artificial Sequence: Synthetic oligonucleotide
tagtagccaatttggtca

SEQ ID NO: 4131 - DNA, 18 bp, Artificial Sequence
  Description of Artificial Sequence: Synthetic oligonucleotide
gtagtagccaatttggtc

SEQ ID NO: 4132 - DNA, 18 bp, Artificial Sequence
  Description of Artificial Sequence: Synthetic oligonucleotide
ggtagtagccaatttggt

SEQ ID NO: 4133 - DNA, 18 bp, Artificial Sequence
  Description of Artificial Sequence: Synthetic oligonucleotide
cggtagtagccaatttgg

SEQ ID NO: 4134 - DNA, 18 bp, Artificial Sequence
  Description of Artificial Sequence: Synthetic oligonucleotide
tcggtagtagccaatttg

SEQ ID NO: 4135 - DNA, 18 bp, Artificial Sequence
  Description of Artificial Sequence: Synthetic oligonucleotide
ttcggtagtagccaattt

SEQ ID NO: 4136 - DNA, 18 bp, Artificial Sequence
  Description of Artificial Sequence: Synthetic oligonucleotide
cttcggtagtagccaatt

SEQ ID NO: 4137 - DNA, 18 bp, Artificial Sequence
  Description of Artificial Sequence: Synthetic oligonucleotide
tcttcggtagtagccaat

SEQ ID NO: 4138 - DNA, 18 bp, Artificial Sequence
  Description of Artificial Sequence: Synthetic oligonucleotide
ctcttcggtagtagccaa

SEQ ID NO: 4139 - DNA, 18 bp, Artificial Sequence
  Description of Artificial Sequence: Synthetic oligonucleotide
gctcttcggtagtagcca

SEQ ID NO: 4140 - DNA, 18 bp, Artificial Sequence
  Description of Artificial Sequence: Synthetic oligonucleotide
agctcttcggtagtagcc

SEQ ID NO: 4141 - DNA, 18 bp, Artificial Sequence
  Description of Artificial Sequence: Synthetic oligonucleotide
tagctcttcggtagtagc

SEQ ID NO: 4142 - DNA, 18 bp, Artificial Sequence
  Description of Artificial Sequence: Synthetic oligonucleotide
gtagctcttcggtagtag

SEQ ID NO: 4143 - DNA, 18 bp, Artificial Sequence
  Description of Artificial Sequence: Synthetic oligonucleotide
ggtagctcttcggtagta

SEQ ID NO: 4144 - DNA, 18 bp, Artificial Sequence
  Description of Artificial Sequence: Synthetic oligonucleotide
caaggctccctcagttgc

SEQ ID NO: 4145 - DNA, 18 bp, Artificial Sequence
  Description of Artificial Sequence: Synthetic oligonucleotide
tcaaggctccctcagttg

SEQ ID NO: 4146 - DNA, 18 bp, Artificial Sequence
  Description of Artificial Sequence: Synthetic oligonucleotide
ttcaaggctccctcagtt

SEQ ID NO: 4147 - DNA, 18 bp, Artificial Sequence
  Description of Artificial Sequence: Synthetic oligonucleotide
attgcgggtgccaatgtg

SEQ ID NO: 4148 - DNA, 18 bp, Artificial Sequence
  Description of Artificial Sequence: Synthetic oligonucleotide
gattgcgggtgccaatgt

SEQ ID NO: 4149 - DNA, 18 bp, Artificial Sequence
  Description of Artificial Sequence: Synthetic oligonucleotide
ggattgcgggtgccaatg

SEQ ID NO: 4150 - DNA, 18 bp, Artificial Sequence
  Description of Artificial Sequence: Synthetic oligonucleotide
aggattgcgggtgccaat

SEQ ID NO: 4151 - DNA, 18 bp, Artificial Sequence
  Description of Artificial Sequence: Synthetic oligonucleotide
tgaggaagttgtagcacg

SEQ ID NO: 4152 - DNA, 18 bp, Artificial Sequence
  Description of Artificial Sequence: Synthetic oligonucleotide
ttgaggaagttgtagcac

SEQ ID NO: 4153 - DNA, 18 bp, Artificial Sequence
  Description of Artificial Sequence: Synthetic oligonucleotide
cttgaggaagttgtagca

SEQ ID NO: 4154 - DNA, 18 bp, Artificial Sequence
  Description of Artificial Sequence: Synthetic oligonucleotide
ccttgaggaagttgtagc

SEQ ID NO: 4155 - DNA, 18 bp, Artificial Sequence
  Description of Artificial Sequence: Synthetic oligonucleotide
tccttgaggaagttgtag

SEQ ID NO: 4156 - DNA, 18 bp, Artificial Sequence
  Description of Artificial Sequence: Synthetic oligonucleotide
ttccttgaggaagttgta

SEQ ID NO: 4157 - DNA, 18 bp, Artificial Sequence
  Description of Artificial Sequence: Synthetic oligonucleotide
gttccttgaggaagttgt

SEQ ID NO: 4158 - DNA, 18 bp, Artificial Sequence
  Description of Artificial Sequence: Synthetic oligonucleotide
tgttccttgaggaagttg

SEQ ID NO: 4159 - DNA, 18 bp, Artificial Sequence
  Description of Artificial Sequence: Synthetic oligonucleotide
ttgttccttgaggaagtt

SEQ ID NO: 4160 - DNA, 18 bp, Artificial Sequence
  Description of Artificial Sequence: Synthetic oligonucleotide
gttgttccttgaggaagt

SEQ ID NO: 4161 - DNA, 18 bp, Artificial Sequence
  Description of Artificial Sequence: Synthetic oligonucleotide
tgttgttccttgaggaag

SEQ ID NO: 4162 - DNA, 18 bp, Artificial Sequence
  Description of Artificial Sequence: Synthetic oligonucleotide
atgttgttccttgaggaa

SEQ ID NO: 4163 - DNA, 18 bp, Artificial Sequence
  Description of Artificial Sequence: Synthetic oligonucleotide
aatgttgttccttgagga

SEQ ID NO: 4164 - DNA, 18 bp, Artificial Sequence
  Description of Artificial Sequence: Synthetic oligonucleotide
caatgttgttccttgagg

SEQ ID NO: 4165 - DNA, 18 bp, Artificial Sequence
  Description of Artificial Sequence: Synthetic oligonucleotide
gcaatgttgttccttgag

SEQ ID NO: 4166 - DNA, 18 bp, Artificial Sequence
  Description of Artificial Sequence: Synthetic oligonucleotide
ggcaatgttgttccttga

SEQ ID NO: 4167 - DNA, 18 bp, Artificial Sequence
  Description of Artificial Sequence: Synthetic oligonucleotide
tggcaatgttgttccttg

SEQ ID NO: 4168 - DNA, 18 bp, Artificial Sequence
  Description of Artificial Sequence: Synthetic oligonucleotide
ttggcaatgttgttcctt

SEQ ID NO: 4169 - DNA, 18 bp, Artificial Sequence
  Description of Artificial Sequence: Synthetic oligonucleotide
tttggcaatgttgttcct

SEQ ID NO: 4170 - DNA, 18 bp, Artificial Sequence
  Description of Artificial Sequence: Synthetic oligonucleotide
ttttggcaatgttgttcc

SEQ ID NO: 4171 - DNA, 18 bp, Artificial Sequence
  Description of Artificial Sequence: Synthetic oligonucleotide
cttttggcaatgttgttc

SEQ ID NO: 4172 - DNA, 18 bp, Artificial Sequence
  Description of Artificial Sequence: Synthetic oligonucleotide
ccttttggcaatgttgtt

SEQ ID NO: 4173 - DNA, 18 bp, Artificial Sequence
  Description of Artificial Sequence: Synthetic oligonucleotide
gccttttggcaatgttgt

SEQ ID NO: 4174 - DNA, 18 bp, Artificial Sequence
  Description of Artificial Sequence: Synthetic oligonucleotide
agccttttggcaatgttg

SEQ ID NO: 4175 - DNA, 18 bp, Artificial Sequence
  Description of Artificial Sequence: Synthetic oligonucleotide
aagccttttggcaatgtt

SEQ ID NO: 4176 - DNA, 18 bp, Artificial Sequence
  Description of Artificial Sequence: Synthetic oligonucleotide
gaagccttttggcaatgt

SEQ ID NO: 4177 - DNA, 18 bp, Artificial Sequence
  Description of Artificial Sequence: Synthetic oligonucleotide
agaagccttttggcaatg

SEQ ID NO: 4178 - DNA, 18 bp, Artificial Sequence
  Description of Artificial Sequence: Synthetic oligonucleotide
tagaagccttttggcaat

SEQ ID NO: 4179 - DNA, 18 bp, Artificial Sequence
  Description of Artificial Sequence: Synthetic oligonucleotide
gtagaagccttttggcaa

SEQ ID NO: 4180 - DNA, 18 bp, Artificial Sequence
  Description of Artificial Sequence: Synthetic oligonucleotide
cgtagaagccttttggca

SEQ ID NO: 4181 - DNA, 18 bp, Artificial Sequence
  Description of Artificial Sequence: Synthetic oligonucleotide
gcgtagaagccttttggc

SEQ ID NO: 4182 - DNA, 18 bp, Artificial Sequence
  Description of Artificial Sequence: Synthetic oligonucleotide
tgcgtagaagccttttgg

SEQ ID NO: 4183 - DNA, 18 bp, Artificial Sequence
  Description of Artificial Sequence: Synthetic oligonucleotide
ctgcgtagaagccttttg

SEQ ID NO: 4184 - DNA, 18 bp, Artificial Sequence
  Description of Artificial Sequence: Synthetic oligonucleotide
tctgcgtagaagcctttt

SEQ ID NO: 4185 - DNA, 18 bp, Artificial Sequence
  Description of Artificial Sequence: Synthetic oligonucleotide
ttgactgccgcctctgct

SEQ ID NO: 4186 - DNA, 18 bp, Artificial Sequence
  Description of Artificial Sequence: Synthetic oligonucleotide
cttgactgccgcctctgc

SEQ ID NO: 4187 - DNA, 18 bp, Artificial Sequence
  Description of Artificial Sequence: Synthetic oligonucleotide
gcttgactgccgcctctg

SEQ ID NO: 4188 - DNA, 18 bp, Artificial Sequence
  Description of Artificial Sequence: Synthetic oligonucleotide
ggcttgactgccgcctct

SEQ ID NO: 4189 - DNA, 18 bp, Artificial Sequence
  Description of Artificial Sequence: Synthetic oligonucleotide
aggcttgactgccgcctc

SEQ ID NO: 4190 - DNA, 18 bp, Artificial Sequence
  Description of Artificial Sequence: Synthetic oligonucleotide
gaggcttgactgccgcct

SEQ ID NO: 4191 - DNA, 18 bp, Artificial Sequence
  Description of Artificial Sequence: Synthetic oligonucleotide
agaggcttgactgccgcc

SEQ ID NO: 4192 - DNA, 18 bp, Artificial Sequence
  Description of Artificial Sequence: Synthetic oligonucleotide
aagaggcttgactgccgc

SEQ ID NO: 4193 - DNA, 18 bp, Artificial Sequence
  Description of Artificial Sequence: Synthetic oligonucleotide
gaagaggcttgactgccg

SEQ ID NO: 4194 - DNA, 18 bp, Artificial Sequence
  Description of Artificial Sequence: Synthetic oligonucleotide
agaagaggcttgactgcc

SEQ ID NO: 4195 - DNA, 18 bp, Artificial Sequence
  Description of Artificial Sequence: Synthetic oligonucleotide
gagaagaggcttgactgc

SEQ ID NO: 4196 - DNA, 18 bp, Artificial Sequence
  Description of Artificial Sequence: Synthetic oligonucleotide
cgagaagaggcttgactg

SEQ ID NO: 4197 - DNA, 18 bp, Artificial Sequence
  Description of Artificial Sequence: Synthetic oligonucleotide
ggagttgaatttcttgaa

SEQ ID NO: 4198 - DNA, 18 bp, Artificial Sequence
  Description of Artificial Sequence: Synthetic oligonucleotide
aagctggttcaatctgtc

SEQ ID NO: 4199 - DNA, 18 bp, Artificial Sequence
  Description of Artificial Sequence: Synthetic oligonucleotide
caagctggttcaatctgt

SEQ ID NO: 4200 - DNA, 18 bp, Artificial Sequence
  Description of Artificial Sequence: Synthetic oligonucleotide
tcaagctggttcaatctg

SEQ ID NO: 4201 - DNA, 18 bp, Artificial Sequence
  Description of Artificial Sequence: Synthetic oligonucleotide
ctcaagctggttcaatct

SEQ ID NO: 4202 - DNA, 18 bp, Artificial Sequence
  Description of Artificial Sequence: Synthetic oligonucleotide
tctcaagctggttcaatc

SEQ ID NO: 4203 - DNA, 18 bp, Artificial Sequence
  Description of Artificial Sequence: Synthetic oligonucleotide
ctctcaagctggttcaat

SEQ ID NO: 4204 - DNA, 18 bp, Artificial Sequence
  Description of Artificial Sequence: Synthetic oligonucleotide
gctctcaagctggttcaa

SEQ ID NO: 4205 - DNA, 18 bp, Artificial Sequence
  Description of Artificial Sequence: Synthetic oligonucleotide
tgctctcaagctggttca

SEQ ID NO: 4206 - DNA, 18 bp, Artificial Sequence
  Description of Artificial Sequence: Synthetic oligonucleotide
ttgctctcaagctggttc

SEQ ID NO: 4207 - DNA, 18 bp, Artificial Sequence
  Description of Artificial Sequence: Synthetic oligonucleotide
tttgctctcaagctggtt

SEQ ID NO: 4208 - DNA, 18 bp, Artificial Sequence
  Description of Artificial Sequence: Synthetic oligonucleotide
ttgttggcctttaccaga

SEQ ID NO: 4209 - DNA, 18 bp, Artificial Sequence
  Description of Artificial Sequence: Synthetic oligonucleotide
gttgttggcctttaccag

SEQ ID NO: 4210 - DNA, 18 bp, Artificial Sequence
  Description of Artificial Sequence: Synthetic oligonucleotide
tgttgttggcctttacca

SEQ ID NO: 4211 - DNA, 18 bp, Artificial Sequence
  Description of Artificial Sequence: Synthetic oligonucleotide
ttgttgttggcctttacc

SEQ ID NO: 4212 - DNA, 18 bp, Artificial Sequence
  Description of Artificial Sequence: Synthetic oligonucleotide
gttgttgttggcctttac

SEQ ID NO: 4213 - DNA, 18 bp, Artificial Sequence
  Description of Artificial Sequence: Synthetic oligonucleotide
tgttgttgttggccttta

SEQ ID NO: 4214 - DNA, 18 bp, Artificial Sequence
  Description of Artificial Sequence: Synthetic oligonucleotide
ttgttgttgttggccttt

SEQ ID NO: 4215 - DNA, 18 bp, Artificial Sequence
  Description of Artificial Sequence: Synthetic oligonucleotide
cttgttgttgttggcctt

SEQ ID NO: 4216 - DNA, 18 bp, Artificial Sequence
  Description of Artificial Sequence: Synthetic oligonucleotide
ccttgttgttgttggcct

SEQ ID NO: 4217 - DNA, 18 bp, Artificial Sequence
  Description of Artificial Sequence: Synthetic oligonucleotide
gccttgttgttgttggcc

SEQ ID NO: 4218 - DNA, 18 bp, Artificial Sequence
  Description of Artificial Sequence: Synthetic oligonucleotide
ggccttgttgttgttggc

SEQ ID NO: 4219 - DNA, 18 bp, Artificial Sequence
  Description of Artificial Sequence: Synthetic oligonucleotide
tggccttgttgttgttgg

SEQ ID NO: 4220 - DNA, 18 bp, Artificial Sequence
  Description of Artificial Sequence: Synthetic oligonucleotide
ttggccttgttgttgttg

SEQ ID NO: 4221 - DNA, 18 bp, Artificial Sequence
  Description of Artificial Sequence: Synthetic oligonucleotide
tttggccttgttgttgtt

SEQ ID NO: 4222 - DNA, 18 bp, Artificial Sequence
  Description of Artificial Sequence: Synthetic oligonucleotide
gtttggccttgttgttgt

SEQ ID NO: 4223 - DNA, 18 bp, Artificial Sequence
  Description of Artificial Sequence: Synthetic oligonucleotide
agtttggccttgttgttg

SEQ ID NO: 4224 - DNA, 18 bp, Artificial Sequence
  Description of Artificial Sequence: Synthetic oligonucleotide
cagtttggccttgttgtt

SEQ ID NO: 4225 - DNA, 18 bp, Artificial Sequence
  Description of Artificial Sequence: Synthetic oligonucleotide
acagtttggccttgttgt

SEQ ID NO: 4226 - DNA, 18 bp, Artificial Sequence
  Description of Artificial Sequence: Synthetic oligonucleotide
gacagtttggccttgttg

SEQ ID NO: 4227 - DNA, 18 bp, Artificial Sequence
  Description of Artificial Sequence: Synthetic oligonucleotide
tgacagtttggccttgtt

SEQ ID NO: 4228 - DNA, 18 bp, Artificial Sequence
  Description of Artificial Sequence: Synthetic oligonucleotide
gtgacagtttggccttgt

SEQ ID NO: 4229 - DNA, 18 bp, Artificial Sequence
  Description of Artificial Sequence: Synthetic oligonucleotide
agtgacagtttggccttg

SEQ ID NO: 4230 - DNA, 18 bp, Artificial Sequence
  Description of Artificial Sequence: Synthetic oligonucleotide
tagtgacagtttggcctt

SEQ ID NO: 4231 - DNA, 18 bp, Artificial Sequence
  Description of Artificial Sequence: Synthetic oligonucleotide
ttagtgacagtttggcct

SEQ ID NO: 4232 - DNA, 18 bp, Artificial Sequence
  Description of Artificial Sequence: Synthetic oligonucleotide
cttagtgacagtttggcc

SEQ ID NO: 4233 - DNA, 18 bp, Artificial Sequence
  Description of Artificial Sequence: Synthetic oligonucleotide
tcttagtgacagtttggc

SEQ ID NO: 4234 - DNA, 18 bp, Artificial Sequence
  Description of Artificial Sequence: Synthetic oligonucleotide
ttcttagtgacagtttgg

SEQ ID NO: 4235 - DNA, 18 bp, Artificial Sequence
  Description of Artificial Sequence: Synthetic oligonucleotide
tttcttagtgacagtttg

SEQ ID NO: 4236 - DNA, 18 bp, Artificial Sequence
  Description of Artificial Sequence: Synthetic oligonucleotide
atttcttagtgacagttt

SEQ ID NO: 4237 - DNA, 18 bp, Artificial Sequence
  Description of Artificial Sequence: Synthetic oligonucleotide
gatttcttagtgacagtt

SEQ ID NO: 4238 - DNA, 18 bp, Artificial Sequence
  Description of Artificial Sequence: Synthetic oligonucleotide
agatttcttagtgacagt

SEQ ID NO: 4239 - DNA, 18 bp, Artificial Sequence
  Description of Artificial Sequence: Synthetic oligonucleotide
cagatttcttagtgacag

SEQ ID NO: 4240 - DNA, 18 bp, Artificial Sequence
  Description of Artificial Sequence: Synthetic oligonucleotide
gcagatttcttagtgaca

SEQ ID NO: 4241 - DNA, 18 bp, Artificial Sequence
  Description of Artificial Sequence: Synthetic oligonucleotide
agcagatttcttagtgac

SEQ ID NO: 4242 - DNA, 18 bp, Artificial Sequence
  Description of Artificial Sequence: Synthetic oligonucleotide
cagcagatttcttagtga

SEQ ID NO: 4243 - DNA, 18 bp, Artificial Sequence
  Description of Artificial Sequence: Synthetic oligonucleotide
gcagcagatttcttagtg

SEQ ID NO: 4244 - DNA, 18 bp, Artificial Sequence
  Description of Artificial Sequence: Synthetic oligonucleotide
agcagcagatttcttagt

SEQ ID NO: 4245 - DNA, 18 bp, Artificial Sequence
  Description of Artificial Sequence: Synthetic oligonucleotide
cagcagcagatttcttag

SEQ ID NO: 4246 - DNA, 18 bp, Artificial Sequence
  Description of Artificial Sequence: Synthetic oligonucleotide
tcagcagcagatttctta

SEQ ID NO: 4247 - DNA, 18 bp, Artificial Sequence
  Description of Artificial Sequence: Synthetic oligonucleotide
ctcagcagcagatttctt

SEQ ID NO: 4248 - DNA, 18 bp, Artificial Sequence
  Description of Artificial Sequence: Synthetic oligonucleotide
cctcagcagcagatttct

SEQ ID NO: 4249 - DNA, 18 bp, Artificial Sequence
  Description of Artificial Sequence: Synthetic oligonucleotide
gcctcagcagcagatttc

SEQ ID NO: 4250 - DNA, 18 bp, Artificial Sequence
  Description of Artificial Sequence: Synthetic oligonucleotide
agttccttgtctgattag

SEQ ID NO: 4251 - DNA, 18 bp, Artificial Sequence
  Description of Artificial Sequence: Synthetic oligonucleotide
cagttccttgtctgatta

SEQ ID NO: 4252 - DNA, 18 bp, Artificial Sequence
  Description of Artificial Sequence: Synthetic oligonucleotide
tcagttccttgtctgatt

SEQ ID NO: 4253 - DNA, 18 bp, Artificial Sequence
  Description of Artificial Sequence: Synthetic oligonucleotide
atcagttccttgtctgat

SEQ ID NO: 4254 - DNA, 18 bp, Artificial Sequence
  Description of Artificial Sequence: Synthetic oligonucleotide
aatcagttccttgtctga

SEQ ID NO: 4255 - DNA, 18 bp, Artificial Sequence
  Description of Artificial Sequence: Synthetic oligonucleotide
taatcagttccttgtctg

SEQ ID NO: 4256 - DNA, 18 bp, Artificial Sequence
  Description of Artificial Sequence: Synthetic oligonucleotide
gtaatcagttccttgtct

SEQ ID NO: 4257 - DNA, 18 bp, Artificial Sequence
  Description of Artificial Sequence: Synthetic oligonucleotide
tgtaatcagttccttgtc

SEQ ID NO: 4258 - DNA, 18 bp, Artificial Sequence
  Description of Artificial Sequence: Synthetic oligonucleotide
ttgtaatcagttccttgt

SEQ ID NO: 4259 - DNA, 18 bp, Artificial Sequence
  Description of Artificial Sequence: Synthetic oligonucleotide
tttgtaatcagttccttg

SEQ ID NO: 4260 - DNA, 18 bp, Artificial Sequence
  Description of Artificial Sequence: Synthetic oligonucleotide
gtttgtaatcagttcctt

SEQ ID NO: 4261 - DNA, 18 bp, Artificial Sequence
  Description of Artificial Sequence: Synthetic oligonucleotide
tgtttgtaatcagttcct

SEQ ID NO: 4262 - DNA, 18 bp, Artificial Sequence
  Description of Artificial Sequence: Synthetic oligonucleotide
ttgtgcaatttgcggcca

SEQ ID NO: 4263 - DNA, 18 bp, Artificial Sequence
  Description of Artificial Sequence: Synthetic oligonucleotide
attgtgcaatttgcggcc

SEQ ID NO: 4264 - DNA, 18 bp, Artificial Sequence
  Description of Artificial Sequence: Synthetic oligonucleotide
aattgtgcaatttgcggc

SEQ ID NO: 4265 - DNA, 18 bp, Artificial Sequence
  Description of Artificial Sequence: Synthetic oligonucleotide
aaattgtgcaatttgcgg

SEQ ID NO: 4266 - DNA, 18 bp, Artificial Sequence
  Description of Artificial Sequence: Synthetic oligonucleotide
caaattgtgcaatttgcg

SEQ ID NO: 4267 - DNA, 18 bp, Artificial Sequence
  Description of Artificial Sequence: Synthetic oligonucleotide
gcaaattgtgcaatttgc

SEQ ID NO: 4268 - DNA, 18 bp, Artificial Sequence
  Description of Artificial Sequence: Synthetic oligonucleotide
gacttccatgccaatgcg

SEQ ID NO: 4269 - DNA, 18 bp, Artificial Sequence
  Description of Artificial Sequence: Synthetic oligonucleotide
tgacttccatgccaatgc

SEQ ID NO: 4270 - DNA, 18 bp, Artificial Sequence
  Description of Artificial Sequence: Synthetic oligonucleotide
gtgacttccatgccaatg

SEQ ID NO: 4271 - DNA, 18 bp, Artificial Sequence
  Description of Artificial Sequence: Synthetic oligonucleotide
tgtgacttccatgccaat

SEQ ID NO: 4272 - DNA, 18 bp, Artificial Sequence
  Description of Artificial Sequence: Synthetic oligonucleotide
gtgtgacttccatgccaa

SEQ ID NO: 4273 - DNA, 18 bp, Artificial Sequence
  Description of Artificial Sequence: Synthetic oligonucleotide
ggtgtgacttccatgcca

SEQ ID NO: 4274 - DNA, 18 bp, Artificial Sequence
  Description of Artificial Sequence: Synthetic oligonucleotide
aggtgtgacttccatgcc

SEQ ID NO: 4275 - DNA, 18 bp, Artificial Sequence
  Description of Artificial Sequence: Synthetic oligonucleotide
aaggtgtgacttccatgc

SEQ ID NO: 4276 - DNA, 18 bp, Artificial Sequence
  Description of Artificial Sequence: Synthetic oligonucleotide
gaaggtgtgacttccatg

SEQ ID NO: 4277 - DNA, 18 bp, Artificial Sequence
  Description of Artificial Sequence: Synthetic oligonucleotide
cgaaggtgtgacttccat

SEQ ID NO: 4278 - DNA, 18 bp, Artificial Sequence
  Description of Artificial Sequence: Synthetic oligonucleotide
ccgaaggtgtgacttcca

SEQ ID NO: 4279 - DNA, 18 bp, Artificial Sequence
  Description of Artificial Sequence: Synthetic oligonucleotide
cccgaaggtgtgacttcc

SEQ ID NO: 4280 - DNA, 18 bp, Artificial Sequence
  Description of Artificial Sequence: Synthetic oligonucleotide
tcccgaaggtgtgacttc

SEQ ID NO: 4281 - DNA, 18 bp, Artificial Sequence
  Description of Artificial Sequence: Synthetic oligonucleotide
ttcccgaaggtgtgactt

SEQ ID NO: 4282 - DNA, 18 bp, Artificial Sequence
  Description of Artificial Sequence: Synthetic oligonucleotide
gttcccgaaggtgtgact

SEQ ID NO: 4283 - DNA, 18 bp, Artificial Sequence
  Description of Artificial Sequence: Synthetic oligonucleotide
atctttgtcatccaattt

SEQ ID NO: 4284 - DNA, 18 bp, Artificial Sequence
  Description of Artificial Sequence: Synthetic oligonucleotide
gatctttgtcatccaatt

SEQ ID NO: 4285 - DNA, 18 bp, Artificial Sequence
  Description of Artificial Sequence: Synthetic oligonucleotide
ggatctttgtcatccaat

SEQ ID NO: 4286 - DNA, 18 bp, Artificial Sequence
  Description of Artificial Sequence: Synthetic oligonucleotide
tggatctttgtcatccaa

SEQ ID NO: 4287 - DNA, 18 bp, Artificial Sequence
  Description of Artificial Sequence: Synthetic oligonucleotide
tgttttgtatgcgtcaat

SEQ ID NO: 4288 - DNA, 18 bp, Artificial Sequence
  Description of Artificial Sequence: Synthetic oligonucleotide
atgttttgtatgcgtcaa

SEQ ID NO: 4289 - DNA, 18 bp, Artificial Sequence
  Description of Artificial Sequence: Synthetic oligonucleotide
aatgttttgtatgcgtca

SEQ ID NO: 4290 - DNA, 18 bp, Artificial Sequence
  Description of Artificial Sequence: Synthetic oligonucleotide
gaatgttttgtatgcgtc

SEQ ID NO: 4291 - DNA, 18 bp, Artificial Sequence
  Description of Artificial Sequence: Synthetic oligonucleotide
ggaatgttttgtatgcgt

SEQ ID NO: 4292 - DNA, 18 bp, Artificial Sequence
  Description of Artificial Sequence: Synthetic oligonucleotide
gggaatgttttgtatgcg

SEQ ID NO: 4293 - DNA, 18 bp, Artificial Sequence
  Description of Artificial Sequence: Synthetic oligonucleotide
tgggaatgttttgtatgc

SEQ ID NO: 4294 - DNA, 18 bp, Artificial Sequence
  Description of Artificial Sequence: Synthetic oligonucleotide
gtgggaatgttttgtatg

SEQ ID NO: 4295 - DNA, 18 bp, Artificial Sequence
  Description of Artificial Sequence: Synthetic oligonucleotide
ggtgggaatgttttgtat

SEQ ID NO: 4296 - DNA, 18 bp, Artificial Sequence
  Description of Artificial Sequence: Synthetic oligonucleotide
tggtgggaatgttttgta

SEQ ID NO: 4297 - DNA, 18 bp, Artificial Sequence
  Description of Artificial Sequence: Synthetic oligonucleotide
ttggtgggaatgttttgt

SEQ ID NO: 4298 - DNA, 18 bp, Artificial Sequence
  Description of Artificial Sequence: Synthetic oligonucleotide
gttggtgggaatgttttg

SEQ ID NO: 4299 - DNA, 18 bp, Artificial Sequence
  Description of Artificial Sequence: Synthetic oligonucleotide
tgttggtgggaatgtttt

SEQ ID NO: 4300 - DNA, 18 bp, Artificial Sequence
  Description of Artificial Sequence: Synthetic oligonucleotide
ctgttggtgggaatgttt

SEQ ID NO: 4301 - DNA, 18 bp, Artificial Sequence
  Description of Artificial Sequence: Synthetic oligonucleotide
tctgttggtgggaatgtt

SEQ ID NO: 4302 - DNA, 18 bp, Artificial Sequence
  Description of Artificial Sequence: Synthetic oligonucleotide
ctctgttggtgggaatgt

SEQ ID NO: 4303 - DNA, 18 bp, Artificial Sequence
  Description of Artificial Sequence: Synthetic oligonucleotide
gctctgttggtgggaatg

SEQ ID NO: 4304 - DNA, 18 bp, Artificial Sequence
  Description of Artificial Sequence: Synthetic oligonucleotide
ggctctgttggtgggaat

SEQ ID NO: 4305 - DNA, 18 bp, Artificial Sequence
  Description of Artificial Sequence: Synthetic oligonucleotide
aggctctgttggtgggaa

SEQ ID NO: 4306 - DNA, 18 bp, Artificial Sequence
  Description of Artificial Sequence: Synthetic oligonucleotide
taggctctgttggtggga

SEQ ID NO: 4307 - DNA, 18 bp, Artificial Sequence
  Description of Artificial Sequence: Synthetic oligonucleotide
ttaggctctgttggtggg

SEQ ID NO: 4308 - DNA, 18 bp, Artificial Sequence
  Description of Artificial Sequence: Synthetic oligonucleotide
tttaggctctgttggtgg

SEQ ID NO: 4309 - DNA, 18 bp, Artificial Sequence
  Description of Artificial Sequence: Synthetic oligonucleotide
ttttaggctctgttggtg

SEQ ID NO: 4310 - DNA, 18 bp, Artificial Sequence
  Description of Artificial Sequence: Synthetic oligonucleotide
tttttaggctctgttggt

SEQ ID NO: 4311 - DNA, 18 bp, Artificial Sequence
  Description of Artificial Sequence: Synthetic oligonucleotide
ctttttaggctctgttgg

SEQ ID NO: 4312 - DNA, 18 bp, Artificial Sequence
  Description of Artificial Sequence: Synthetic oligonucleotide
cctttttaggctctgttg

SEQ ID NO: 4313 - DNA, 18 bp, Artificial Sequence
  Description of Artificial Sequence: Synthetic oligonucleotide
tcctttttaggctctgtt

SEQ ID NO: 4314 - DNA, 18 bp, Artificial Sequence
  Description of Artificial Sequence: Synthetic oligonucleotide
gtcctttttaggctctgt

SEQ ID NO: 4315 - DNA, 18 bp, Artificial Sequence
  Description of Artificial Sequence: Synthetic oligonucleotide
tgtcctttttaggctctg

SEQ ID NO: 4316 - DNA, 18 bp, Artificial Sequence
  Description of Artificial Sequence: Synthetic oligonucleotide
ttgtcctttttaggctct

SEQ ID NO: 4317 - DNA, 18 bp, Artificial Sequence
  Description of Artificial Sequence: Synthetic oligonucleotide
tttgtcctttttaggctc

SEQ ID NO: 4318 - DNA, 18 bp, Artificial Sequence
  Description of Artificial Sequence: Synthetic oligonucleotide
ttttgtcctttttaggct

SEQ ID NO: 4319 - DNA, 18 bp, Artificial Sequence
  Description of Artificial Sequence: Synthetic oligonucleotide
tttttgtcctttttaggc

SEQ ID NO: 4320 - DNA, 18 bp, Artificial Sequence
  Description of Artificial Sequence: Synthetic oligonucleotide
ctttttgtcctttttagg

SEQ ID NO: 4321 - DNA, 18 bp, Artificial Sequence
  Description of Artificial Sequence: Synthetic oligonucleotide
tctttttgtcctttttag

SEQ ID NO: 4322 - DNA, 18 bp, Artificial Sequence
  Description of Artificial Sequence: Synthetic oligonucleotide
ttctttttgtccttttta

SEQ ID NO: 4323 - DNA, 18 bp, Artificial Sequence
  Description of Artificial Sequence: Synthetic oligonucleotide
aggaagaagagtcacagt

SEQ ID NO: 4324 - DNA, 18 bp, Artificial Sequence
  Description of Artificial Sequence: Synthetic oligonucleotide
caggaagaagagtcacag

SEQ ID NO: 4325 - DNA, 18 bp, Artificial Sequence
  Description of Artificial Sequence: Synthetic oligonucleotide
gcaggaagaagagtcaca

SEQ ID NO: 4326 - DNA, 18 bp, Artificial Sequence
  Description of Artificial Sequence: Synthetic oligonucleotide
catctgccttgtgtggtc

SEQ ID NO: 4327 - DNA, 18 bp, Artificial Sequence
  Description of Artificial Sequence: Synthetic oligonucleotide
ccatctgccttgtgtggt

SEQ ID NO: 4328 - DNA, 18 bp, Artificial Sequence
  Description of Artificial Sequence: Synthetic oligonucleotide
cccatctgccttgtgtgg

SEQ ID NO: 4329 - DNA, 18 bp, Artificial Sequence
  Description of Artificial Sequence: Synthetic oligonucleotide
gcccatctgccttgtgtg

SEQ ID NO: 4330 - DNA, 18 bp, Artificial Sequence
  Description of Artificial Sequence: Synthetic oligonucleotide
agcccatctgccttgtgt

SEQ ID NO: 4331 - DNA, 18 bp, Artificial Sequence
  Description of Artificial Sequence: Synthetic oligonucleotide
tagcccatctgccttgtg

SEQ ID NO: 4332 - DNA, 18 bp, Artificial Sequence
  Description of Artificial Sequence: Synthetic oligonucleotide
atagcccatctgccttgt

SEQ ID NO: 4333 - DNA, 18 bp, Artificial Sequence
  Description of Artificial Sequence: Synthetic oligonucleotide
tgcacaagagtagactat

SEQ ID NO: 4334 - DNA, 18 bp, Artificial Sequence
  Description of Artificial Sequence: Synthetic oligonucleotide
ctgcacaagagtagacta

SEQ ID NO: 4335 - DNA, 18 bp, Artificial Sequence
  Description of Artificial Sequence: Synthetic oligonucleotide
tctgcacaagagtagact

SEQ ID NO: 4336 - DNA, 18 bp, Artificial Sequence
  Description of Artificial Sequence: Synthetic oligonucleotide
ttctgcacaagagtagac

SEQ ID NO: 4337 - DNA, 18 bp, Artificial Sequence
  Description of Artificial Sequence: Synthetic oligonucleotide
attctgcacaagagtaga

SEQ ID NO: 4338 - DNA, 18 bp, Artificial Sequence
  Description of Artificial Sequence: Synthetic oligonucleotide
cattctgcacaagagtag

SEQ ID NO: 4339 - DNA, 18 bp, Artificial Sequence
  Description of Artificial Sequence: Synthetic oligonucleotide
tcattctgcacaagagta

SEQ ID NO: 4340 - DNA, 18 bp, Artificial Sequence
  Description of Artificial Sequence: Synthetic oligonucleotide
ttcattctgcacaagagt

SEQ ID NO: 4341 - DNA, 18 bp, Artificial Sequence
  Description of Artificial Sequence: Synthetic oligonucleotide
attcattctgcacaagag

SEQ ID NO: 4342 - DNA, 18 bp, Artificial Sequence
  Description of Artificial Sequence: Synthetic oligonucleotide
aattcattctgcacaaga

SEQ ID NO: 4343 - DNA, 18 bp, Artificial Sequence
  Description of Artificial Sequence: Synthetic oligonucleotide
gaattcattctgcacaag

SEQ ID NO: 4344 - DNA, 18 bp, Artificial Sequence
  Description of Artificial Sequence: Synthetic oligonucleotide
agaattcattctgcacaa

SEQ ID NO: 4345 - DNA, 18 bp, Artificial Sequence
  Description of Artificial Sequence: Synthetic oligonucleotide
gagaattcattctgcaca

SEQ ID NO: 4346 - DNA, 18 bp, Artificial Sequence
  Description of Artificial Sequence: Synthetic oligonucleotide
cgagaattcattctgcac

SEQ ID NO: 4347 - DNA, 18 bp, Artificial Sequence
  Description of Artificial Sequence: Synthetic oligonucleotide
acgagaattcattctgca

SEQ ID NO: 4348 - DNA, 18 bp, Artificial Sequence
  Description of Artificial Sequence: Synthetic oligonucleotide
tacgagaattcattctgc

SEQ ID NO: 4349 - DNA, 18 bp, Artificial Sequence
  Description of Artificial Sequence: Synthetic oligonucleotide
tgagattaaagttaacta

SEQ ID NO: 4350 - DNA, 18 bp, Artificial Sequence
  Description of Artificial Sequence: Synthetic oligonucleotide
gtgagattaaagttaact

SEQ ID NO: 4351 - DNA, 18 bp, Artificial Sequence
  Description of Artificial Sequence: Synthetic oligonucleotide
tgtgagattaaagttaac

SEQ ID NO: 4352 - DNA, 18 bp, Artificial Sequence
  Description of Artificial Sequence: Synthetic oligonucleotide
atgtgagattaaagttaa

SEQ ID NO: 4353 - DNA, 18 bp, Artificial Sequence
  Description of Artificial Sequence: Synthetic oligonucleotide
tatgtgagattaaagtta

SEQ ID NO: 4354 - DNA, 18 bp, Artificial Sequence
  Description of Artificial Sequence: Synthetic oligonucleotide
ctatgtgagattaaagtt

SEQ ID NO: 4355 - DNA, 18 bp, Artificial Sequence
  Description of Artificial Sequence: Synthetic oligonucleotide
gctatgtgagattaaagt

SEQ ID NO: 4356 - DNA, 18 bp, Artificial Sequence
  Description of Artificial Sequence: Synthetic oligonucleotide
tgctatgtgagattaaag

SEQ ID NO: 4357 - DNA, 18 bp, Artificial Sequence
  Description of Artificial Sequence: Synthetic oligonucleotide
ttgctatgtgagattaaa

SEQ ID NO: 4358 - DNA, 18 bp, Artificial Sequence
  Description of Artificial Sequence: Synthetic oligonucleotide
attgctatgtgagattaa

SEQ ID NO: 4359 - DNA, 18 bp, Artificial Sequence
  Description of Artificial Sequence: Synthetic oligonucleotide
gattgctatgtgagatta

SEQ ID NO: 4360 - DNA, 18 bp, Artificial Sequence
  Description of Artificial Sequence: Synthetic oligonucleotide
agattgctatgtgagatt

SEQ ID NO: 4361 - DNA, 18 bp, Artificial Sequence
  Description of Artificial Sequence: Synthetic oligonucleotide
aagattgctatgtgagat

SEQ ID NO: 4362 - DNA, 18 bp, Artificial Sequence
  Description of Artificial Sequence: Synthetic oligonucleotide
aaagattgctatgtgaga

SEQ ID NO: 4363 - DNA, 18 bp, Artificial Sequence
  Description of Artificial Sequence: Synthetic oligonucleotide
taaagattgctatgtgag

SEQ ID NO: 4364 - DNA, 18 bp, Artificial Sequence
  Description of Artificial Sequence: Synthetic oligonucleotide
ttaaagattgctatgtga

SEQ ID NO: 4365 - DNA, 18 bp, Artificial Sequence
  Description of Artificial Sequence: Synthetic oligonucleotide
attaaagattgctatgtg

SEQ ID NO: 4366 - DNA, 18 bp, Artificial Sequence
  Description of Artificial Sequence: Synthetic oligonucleotide
gattaaagattgctatgt

SEQ ID NO: 4367 - DNA, 18 bp, Artificial Sequence
  Description of Artificial Sequence: Synthetic oligonucleotide
tgattaaagattgctatg

SEQ ID NO: 4368 - DNA, 18 bp, Artificial Sequence
  Description of Artificial Sequence: Synthetic oligonucleotide
cctccctaatgttacaca

SEQ ID NO: 4369 - DNA, 18 bp, Artificial Sequence
  Description of Artificial Sequence: Synthetic oligonucleotide
tcctccctaatgttacac

SEQ ID NO: 4370 - DNA, 18 bp, Artificial Sequence
  Description of Artificial Sequence: Synthetic oligonucleotide
gtcctccctaatgttaca

SEQ ID NO: 4371 - DNA, 18 bp, Artificial Sequence
  Description of Artificial Sequence: Synthetic oligonucleotide
agtcctccctaatgttac

SEQ ID NO: 4372 - DNA, 18 bp, Artificial Sequence
  Description of Artificial Sequence: Synthetic oligonucleotide
aagtcctccctaatgtta

SEQ ID NO: 4373 - DNA, 18 bp, Artificial Sequence
  Description of Artificial Sequence: Synthetic oligonucleotide
caagtcctccctaatgtt

SEQ ID NO: 4374 - DNA, 18 bp, Artificial Sequence
  Description of Artificial Sequence: Synthetic oligonucleotide
tcaagtcctccctaatgt

SEQ ID NO: 4375 - DNA, 18 bp, Artificial Sequence
  Description of Artificial Sequence: Synthetic oligonucleotide
ttcaagtcctccctaatg

SEQ ID NO: 4376 - DNA, 18 bp, Artificial Sequence
  Description of Artificial Sequence: Synthetic oligonucleotide
tttcaagtcctccctaat

SEQ ID NO: 4377 - DNA, 18 bp, Artificial Sequence
  Description of Artificial Sequence: Synthetic oligonucleotide
ctttcaagtcctccctaa

SEQ ID NO: 4378 - DNA, 18 bp, Artificial Sequence
  Description of Artificial Sequence: Synthetic oligonucleotide
tctttcaagtcctcccta

SEQ ID NO: 4379 - DNA, 18 bp, Artificial Sequence
  Description of Artificial Sequence: Synthetic oligonucleotide
ctctttcaagtcctccct

SEQ ID NO: 4380 - DNA, 18 bp, Artificial Sequence
  Description of Artificial Sequence: Synthetic oligonucleotide
gctctttcaagtcctccc

SEQ ID NO: 4381 - DNA, 18 bp, Artificial Sequence
  Description of Artificial Sequence: Synthetic oligonucleotide
ggctctttcaagtcctcc

SEQ ID NO: 4382 - DNA, 18 bp, Artificial Sequence
  Description of Artificial Sequence: Synthetic oligonucleotide
tggctctttcaagtcctc

SEQ ID NO: 4383 - DNA, 18 bp, Artificial Sequence
  Description of Artificial Sequence: Synthetic oligonucleotide
gtggctctttcaagtcct

SEQ ID NO: 4384 - DNA, 18 bp, Artificial Sequence
  Description of Artificial Sequence: Synthetic oligonucleotide
ggtggctctttcaagtcc

SEQ ID NO: 4385 - DNA, 18 bp, Artificial Sequence
  Description of Artificial Sequence: Synthetic oligonucleotide
tggtggctctttcaagtc

SEQ ID NO: 4386 - DNA, 18 bp, Artificial Sequence
  Description of Artificial Sequence: Synthetic oligonucleotide
gtggtggctctttcaagt

SEQ ID NO: 4387 - DNA, 18 bp, Artificial Sequence
  Description of Artificial Sequence: Synthetic oligonucleotide
tgtggtggctctttcaag

SEQ ID NO: 4388 - DNA, 18 bp, Artificial Sequence
  Description of Artificial Sequence: Synthetic oligonucleotide
atgtggtggctctttcaa

SEQ ID NO: 4389 - DNA, 18 bp, Artificial Sequence
  Description of Artificial Sequence: Synthetic oligonucleotide
aatgtggtggctctttca

SEQ ID NO: 4390 - DNA, 18 bp, Artificial Sequence
  Description of Artificial Sequence: Synthetic oligonucleotide
aaatgtggtggctctttc

SEQ ID NO: 4391 - DNA, 18 bp, Artificial Sequence
  Description of Artificial Sequence: Synthetic oligonucleotide
aaaatgtggtggctcttt

SEQ ID NO: 4392 - DNA, 18 bp, Artificial Sequence
  Description of Artificial Sequence: Synthetic oligonucleotide
gaaaatgtggtggctctt

SEQ ID NO: 4393 - DNA, 18 bp, Artificial Sequence
  Description of Artificial Sequence: Synthetic oligonucleotide
tgaaaatgtggtggctct

SEQ ID NO: 4394 - DNA, 18 bp, Artificial Sequence
  Description of Artificial Sequence: Synthetic oligonucleotide
gtactccgcgtggcctcg

SEQ ID NO: 4395 - DNA, 18 bp, Artificial Sequence
  Description of Artificial Sequence: Synthetic oligonucleotide
cgtactccgcgtggcctc

SEQ ID NO: 4396 - DNA, 18 bp, Artificial Sequence
  Description of Artificial Sequence: Synthetic oligonucleotide
tcgtactccgcgtggcct

SEQ ID NO: 4397 - DNA, 18 bp, Artificial Sequence
  Description of Artificial Sequence: Synthetic oligonucleotide
atcgtactccgcgtggcc

SEQ ID NO: 4398 - DNA, 18 bp, Artificial Sequence
  Description of Artificial Sequence: Synthetic oligonucleotide
gatcgtactccgcgtggc

SEQ ID NO: 4399 - DNA, 18 bp, Artificial Sequence
  Description of Artificial Sequence: Synthetic oligonucleotide
cgatcgtactccgcgtgg

SEQ ID NO: 4400 - DNA, 18 bp, Artificial Sequence
  Description of Artificial Sequence: Synthetic oligonucleotide
tcgatcgtactccgcgtg

SEQ ID NO: 4401 - DNA, 18 bp, Artificial Sequence
  Description of Artificial Sequence: Synthetic oligonucleotide
ctcgatcgtactccgcgt

SEQ ID NO: 4402 - DNA, 18 bp, Artificial Sequence
  Description of Artificial Sequence: Synthetic oligonucleotide
gcagctctccctagcatt

SEQ ID NO: 4403 - DNA, 18 bp, Artificial Sequence
  Description of Artificial Sequence: Synthetic oligonucleotide
ggcagctctccctagcat

SEQ ID NO: 4404 - DNA, 18 bp, Artificial Sequence
  Description of Artificial Sequence: Synthetic oligonucleotide
aggcagctctccctagca

SEQ ID NO: 4405 - DNA, 18 bp, Artificial Sequence
  Description of Artificial Sequence: Synthetic oligonucleotide
taggcagctctccctagc

SEQ ID NO: 4406 - DNA, 18 bp, Artificial Sequence
  Description of Artificial Sequence: Synthetic oligonucleotide
ataggcagctctccctag

SEQ ID NO: 4407 - DNA, 18 bp, Artificial Sequence
  Description of Artificial Sequence: Synthetic oligonucleotide
tataggcagctctcccta

SEQ ID NO: 4408 - DNA, 18 bp, Artificial Sequence
  Description of Artificial Sequence: Synthetic oligonucleotide
atataggcagctctccct

SEQ ID NO: 4409 - DNA, 18 bp, Artificial Sequence
  Description of Artificial Sequence: Synthetic oligonucleotide
catataggcagctctccc

SEQ ID NO: 4410 - DNA, 18 bp, Artificial Sequence
  Description of Artificial Sequence: Synthetic oligonucleotide
ccatataggcagctctcc

SEQ ID NO: 4411 - DNA, 18 bp, Artificial Sequence
  Description of Artificial Sequence: Synthetic oligonucleotide
tccatataggcagctctc

SEQ ID NO: 4412 - DNA, 18 bp, Artificial Sequence
  Description of Artificial Sequence: Synthetic oligonucleotide
ttccatataggcagctct

SEQ ID NO: 4413 - DNA, 18 bp, Artificial Sequence
  Description of Artificial Sequence: Synthetic oligonucleotide
cttccatataggcagctc

SEQ ID NO: 4414 - DNA, 18 bp, Artificial Sequence
  Description of Artificial Sequence: Synthetic oligonucleotide
tcttccatataggcagct

SEQ ID NO: 4415 - DNA, 18 bp, Artificial Sequence
  Description of Artificial Sequence: Synthetic oligonucleotide
ctcttccatataggcagc

SEQ ID NO: 4416 - DNA, 18 bp, Artificial Sequence
  Description of Artificial Sequence: Synthetic oligonucleotide
gctcttccatataggcag

SEQ ID NO: 4417 - DNA, 18 bp, Artificial Sequence
  Description of Artificial Sequence: Synthetic oligonucleotide
ggctcttccatataggca

SEQ ID NO: 4418 - DNA, 18 bp, Artificial Sequence
  Description of Artificial Sequence: Synthetic oligonucleotide
gggctcttccatataggc

SEQ ID NO: 4419 - DNA, 18 bp, Artificial Sequence
  Description of Artificial Sequence: Synthetic oligonucleotide
agggctcttccatatagg

SEQ ID NO: 4420 - DNA, 18 bp, Artificial Sequence
  Description of Artificial Sequence: Synthetic oligonucleotide
tagggctcttccatatag

SEQ ID NO: 4421 - DNA, 18 bp, Artificial Sequence
  Description of Artificial Sequence: Synthetic oligonucleotide
ttagggctcttccatata

SEQ ID NO: 4422 - DNA, 18 bp, Artificial Sequence
  Description of Artificial Sequence: Synthetic oligonucleotide
attagggctcttccatat

SEQ ID NO: 4423 - DNA, 18 bp, Artificial Sequence
  Description of Artificial Sequence: Synthetic oligonucleotide
cattagggctcttccata

SEQ ID NO: 4424 - DNA, 18 bp, Artificial Sequence
  Description of Artificial Sequence: Synthetic oligonucleotide
acattagggctcttccat

SEQ ID NO: 4425 - DNA, 18 bp, Artificial Sequence
  Description of Artificial Sequence: Synthetic oligonucleotide
cacattagggctcttcca

SEQ ID NO: 4426 - DNA, 18 bp, Artificial Sequence
  Description of Artificial Sequence: Synthetic oligonucleotide
acacattagggctcttcc

SEQ ID NO: 4427 - DNA, 18 bp, Artificial Sequence
  Description of Artificial Sequence: Synthetic oligonucleotide
tacacattagggctcttc

SEQ ID NO: 4428 - DNA, 18 bp, Artificial Sequence
  Description of Artificial Sequence: Synthetic oligonucleotide
ttacacattagggctctt

SEQ ID NO: 4429 - DNA, 18 bp, Artificial Sequence
  Description of Artificial Sequence: Synthetic oligonucleotide
tttacacattagggctct

SEQ ID NO: 4430 - DNA, 18 bp, Artificial Sequence
  Description of Artificial Sequence: Synthetic oligonucleotide
ttttacacattagggctc

SEQ ID NO: 4431 - DNA, 18 bp, Artificial Sequence
  Description of Artificial Sequence: Synthetic oligonucleotide
attttacacattagggct

SEQ ID NO: 4432 - DNA, 18 bp, Artificial Sequence
  Description of Artificial Sequence: Synthetic oligonucleotide
aattttacacattagggc

SEQ ID NO: 4433 - DNA, 18 bp, Artificial Sequence
  Description of Artificial Sequence: Synthetic oligonucleotide
taattttacacattaggg

SEQ ID NO: 4434 - DNA, 18 bp, Artificial Sequence
  Description of Artificial Sequence: Synthetic oligonucleotide
ttaattttacacattagg

SEQ ID NO: 4435 - DNA, 18 bp, Artificial Sequence
  Description of Artificial Sequence: Synthetic oligonucleotide
attaattttacacattag

SEQ ID NO: 4436 - DNA, 18 bp, Artificial Sequence
  Description of Artificial Sequence: Synthetic oligonucleotide
aattaattttacacatta

SEQ ID NO: 4437 - DNA, 18 bp, Artificial Sequence
  Description of Artificial Sequence: Synthetic oligonucleotide
aaattaattttacacatt

SEQ ID NO: 4438 - DNA, 18 bp, Artificial Sequence
  Description of Artificial Sequence: Synthetic oligonucleotide
aaaattaattttacacat

SEQ ID NO: 4439 - DNA, 18 bp, Artificial Sequence
  Description of Artificial Sequence: Synthetic oligonucleotide
taaaattaattttacaca

SEQ ID NO: 4440 - DNA, 18 bp, Artificial Sequence
  Description of Artificial Sequence: Synthetic oligonucleotide
ctaaaattaattttacac

SEQ ID NO: 4441 - DNA, 18 bp, Artificial Sequence
  Description of Artificial Sequence: Synthetic oligonucleotide
actaaaattaattttaca

SEQ ID NO: 4442 - DNA, 18 bp, Artificial Sequence
  Description of Artificial Sequence: Synthetic oligonucleotide
tactaaaattaattttac

SEQ ID NO: 4443 - DNA, 18 bp, Artificial Sequence
  Description of Artificial Sequence: Synthetic oligonucleotide
ctactaaaattaatttta

SEQ ID NO: 4444 - DNA, 20 bp, Artificial Sequence
  Description of Artificial Sequence: Synthetic oligonucleotide
acggacgaaaccgtaagcag

SEQ ID NO: 4445 - DNA, 20 bp, Artificial Sequence
  Description of Artificial Sequence: Synthetic oligonucleotide
cacggacgaaaccgtaagca

SEQ ID NO: 4446 - DNA, 20 bp, Artificial Sequence
  Description of Artificial Sequence: Synthetic oligonucleotide
acacggacgaaaccgtaagc

SEQ ID NO: 4447 - DNA, 20 bp, Artificial Sequence
  Description of Artificial Sequence: Synthetic oligonucleotide
aacacggacgaaaccgtaag

SEQ ID NO: 4448 - DNA, 20 bp, Artificial Sequence
  Description of Artificial Sequence: Synthetic oligonucleotide
caacacggacgaaaccgtaa

SEQ ID NO: 4449 - DNA, 20 bp, Artificial Sequence
  Description of Artificial Sequence: Synthetic oligonucleotide
gcaacacggacgaaaccgta

SEQ ID NO: 4450 - DNA, 20 bp, Artificial Sequence
  Description of Artificial Sequence: Synthetic oligonucleotide
tgcaacacggacgaaaccgt

SEQ ID NO: 4451 - DNA, 20 bp, Artificial Sequence
  Description of Artificial Sequence: Synthetic oligonucleotide
ctgcaacacggacgaaaccg

SEQ ID NO: 4452 - DNA, 20 bp, Artificial Sequence
  Description of Artificial Sequence: Synthetic oligonucleotide
cacacccggacgaaacctag

SEQ ID NO: 4453 - DNA, 20 bp, Artificial Sequence
  Description of Artificial Sequence: Synthetic oligonucleotide
tcacacccggacgaaaccta

SEQ ID NO: 4454 - DNA, 20 bp, Artificial Sequence
  Description of Artificial Sequence: Synthetic oligonucleotide
gtcacacccggacgaaacct

SEQ ID NO: 4455 - DNA, 20 bp, Artificial Sequence
  Description of Artificial Sequence: Synthetic oligonucleotide
ggtcacacccggacgaaacc

SEQ ID NO: 4456 - DNA, 20 bp, Artificial Sequence
  Description of Artificial Sequence: Synthetic oligonucleotide
cggtcacacccggacgaaac

SEQ ID NO: 4457 - DNA, 20 bp, Artificial Sequence
  Description of Artificial Sequence: Synthetic oligonucleotide
tcggtcacacccggacgaaa

SEQ ID NO: 4458 - DNA, 20 bp, Artificial Sequence
  Description of Artificial Sequence: Synthetic oligonucleotide
ttcggtcacacccggacgaa

SEQ ID NO: 4459 - DNA, 20 bp, Artificial Sequence
  Description of Artificial Sequence: Synthetic oligonucleotide
tttcggtcacacccggacga

SEQ ID NO: 4460 - DNA, 20 bp, Artificial Sequence
  Description of Artificial Sequence: Synthetic oligonucleotide
ctttcggtcacacccggacg

SEQ ID NO: 4461 - DNA, 20 bp, Artificial Sequence
  Description of Artificial Sequence: Synthetic oligonucleotide
cctttcggtcacacccggac

SEQ ID NO: 4462 - DNA, 20 bp, Artificial Sequence
  Description of Artificial Sequence: Synthetic oligonucleotide
acctttcggtcacacccgga

SEQ ID NO: 4463 - DNA, 20 bp, Artificial Sequence
  Description of Artificial Sequence: Synthetic oligonucleotide
tacctttcggtcacacccgg

SEQ ID NO: 4464 - DNA, 20 bp, Artificial Sequence
  Description of Artificial Sequence: Synthetic oligonucleotide
ttacctttcggtcacacccg

SEQ ID NO: 4465 - DNA, 20 bp, Artificial Sequence
  Description of Artificial Sequence: Synthetic oligonucleotide
cttacctttcggtcacaccc

SEQ ID NO: 4466 - DNA, 20 bp, Artificial Sequence
  Description of Artificial Sequence: Synthetic oligonucleotide
tcttacctttcggtcacacc

SEQ ID NO: 4467 - DNA, 20 bp, Artificial Sequence
  Description of Artificial Sequence: Synthetic oligonucleotide
atcttacctttcggtcacac

SEQ ID NO: 4468 - DNA, 20 bp, Artificial Sequence
  Description of Artificial Sequence: Synthetic oligonucleotide
catcttacctttcggtcaca

SEQ ID NO: 4469 - DNA, 20 bp, Artificial Sequence
  Description of Artificial Sequence: Synthetic oligonucleotide
ccatcttacctttcggtcac

SEQ ID NO: 4470 - DNA, 20 bp, Artificial Sequence
  Description of Artificial Sequence: Synthetic oligonucleotide
tccatcttacctttcggtca

SEQ ID NO: 4471 - DNA, 20 bp, Artificial Sequence
  Description of Artificial Sequence: Synthetic oligonucleotide
ctccatcttacctttcggtc

SEQ ID NO: 4472 - DNA, 20 bp, Artificial Sequence
  Description of Artificial Sequence: Synthetic oligonucleotide
tctccatcttacctttcggt

SEQ ID NO: 4473 - DNA, 20 bp, Artificial Sequence
  Description of Artificial Sequence: Synthetic oligonucleotide
ctctccatcttacctttcgg

SEQ ID NO: 4474 - DNA, 20 bp, Artificial Sequence
  Description of Artificial Sequence: Synthetic oligonucleotide
gctctccatcttacctttcg

SEQ ID NO: 4475 - DNA, 20 bp, Artificial Sequence
  Description of Artificial Sequence: Synthetic oligonucleotide
ggctctccatcttacctttc

SEQ ID NO: 4476 - DNA, 20 bp, Artificial Sequence
  Description of Artificial Sequence: Synthetic oligonucleotide
aggctctccatcttaccttt

SEQ ID NO: 4477 - DNA, 20 bp, Artificial Sequence
  Description of Artificial Sequence: Synthetic oligonucleotide
aaggctctccatcttacctt

SEQ ID NO: 4478 - DNA, 20 bp, Artificial Sequence
  Description of Artificial Sequence: Synthetic oligonucleotide
caaggctctccatcttacct

SEQ ID NO: 4479 - DNA, 20 bp, Artificial Sequence
  Description of Artificial Sequence: Synthetic oligonucleotide
acaaggctctccatcttacc

SEQ ID NO: 4480 - DNA, 20 bp, Artificial Sequence
  Description of Artificial Sequence: Synthetic oligonucleotide
gacgtgtgttttctcgttga

SEQ ID NO: 4481 - DNA, 20 bp, Artificial Sequence
  Description of Artificial Sequence: Synthetic oligonucleotide
ggacgtgtgttttctcgttg

SEQ ID NO: 4482 - DNA, 20 bp, Artificial Sequence
  Description of Artificial Sequence: Synthetic oligonucleotide
tggacgtgtgttttctcgtt

SEQ ID NO: 4483 - DNA, 20 bp, Artificial Sequence
  Description of Artificial Sequence: Synthetic oligonucleotide
ttggacgtgtgttttctcgt

SEQ ID NO: 4484 - DNA, 20 bp, Artificial Sequence
  Description of Artificial Sequence: Synthetic oligonucleotide
gttggacgtgtgttttctcg

SEQ ID NO: 4485 - DNA, 20 bp, Artificial Sequence
  Description of Artificial Sequence: Synthetic oligonucleotide
agttggacgtgtgttttctc

SEQ ID NO: 4486 - DNA, 20 bp, Artificial Sequence
  Description of Artificial Sequence: Synthetic oligonucleotide
gagttggacgtgtgttttct

SEQ ID NO: 4487 - DNA, 20 bp, Artificial Sequence
  Description of Artificial Sequence: Synthetic oligonucleotide
tgagttggacgtgtgttttc

SEQ ID NO: 4488 - DNA, 20 bp, Artificial Sequence
  Description of Artificial Sequence: Synthetic oligonucleotide
ctgagttggacgtgtgtttt

SEQ ID NO: 4489 - DNA, 20 bp, Artificial Sequence
  Description of Artificial Sequence: Synthetic oligonucleotide
actgagttggacgtgtgttt

SEQ ID NO: 4490 - DNA, 20 bp, Artificial Sequence
  Description of Artificial Sequence: Synthetic oligonucleotide
aactgagttggacgtgtgtt

SEQ ID NO: 4491 - DNA, 20 bp, Artificial Sequence
  Description of Artificial Sequence: Synthetic oligonucleotide
aaactgagttggacgtgtgt

SEQ ID NO: 4492 - DNA, 20 bp, Artificial Sequence
  Description of Artificial Sequence: Synthetic oligonucleotide
caaactgagttggacgtgtg

SEQ ID NO: 4493 - DNA, 20 bp, Artificial Sequence
  Description of Artificial Sequence: Synthetic oligonucleotide
gcaaactgagttggacgtgt

SEQ ID NO: 4494 - DNA, 20 bp, Artificial Sequence
  Description of Artificial Sequence: Synthetic oligonucleotide
ggcaaactgagttggacgtg

SEQ ID NO: 4495 - DNA, 20 bp, Artificial Sequence
  Description of Artificial Sequence: Synthetic oligonucleotide
aggcaaactgagttggacgt

SEQ ID NO: 4496 - DNA, 20 bp, Artificial Sequence
  Description of Artificial Sequence: Synthetic oligonucleotide
caggcaaactgagttggacg

SEQ ID NO: 4497 - DNA, 20 bp, Artificial Sequence
  Description of Artificial Sequence: Synthetic oligonucleotide
acaggcaaactgagttggac

SEQ ID NO: 4498 - DNA, 20 bp, Artificial Sequence
  Description of Artificial Sequence: Synthetic oligonucleotide
aacacatagggctgttcaag

SEQ ID NO: 4499 - DNA, 20 bp, Artificial Sequence
  Description of Artificial Sequence: Synthetic oligonucleotide
gaacacatagggctgttcaa

SEQ ID NO: 4500 - DNA, 20 bp, Artificial Sequence
  Description of Artificial Sequence: Synthetic oligonucleotide
tgaacacatagggctgttca

SEQ ID NO: 4501 - DNA, 20 bp, Artificial Sequence
  Description of Artificial Sequence: Synthetic oligonucleotide
atgaacacatagggctgttc

SEQ ID NO: 4502 - DNA, 20 bp, Artificial Sequence
  Description of Artificial Sequence: Synthetic oligonucleotide
ccgttcttacgaagaagaac

SEQ ID NO: 4503 - DNA, 20 bp, Artificial Sequence
  Description of Artificial Sequence: Synthetic oligonucleotide
accgttcttacgaagaagaa

SEQ ID NO: 4504 - DNA, 20 bp, Artificial Sequence
  Description of Artificial Sequence: Synthetic oligonucleotide
taccgttcttacgaagaaga

SEQ ID NO: 4505 - DNA, 20 bp, Artificial Sequence
  Description of Artificial Sequence: Synthetic oligonucleotide
ttaccgttcttacgaagaag

SEQ ID NO: 4506 - DNA, 20 bp, Artificial Sequence
  Description of Artificial Sequence: Synthetic oligonucleotide
attaccgttcttacgaagaa

SEQ ID NO: 4507 - DNA, 20 bp, Artificial Sequence
  Description of Artificial Sequence: Synthetic oligonucleotide
tattaccgttcttacgaaga

SEQ ID NO: 4508 - DNA, 20 bp, Artificial Sequence
  Description of Artificial Sequence: Synthetic oligonucleotide
ttattaccgttcttacgaag

SEQ ID NO: 4509 - DNA, 20 bp, Artificial Sequence
  Description of Artificial Sequence: Synthetic oligonucleotide
ggatcagtgccaagctcgtc

SEQ ID NO: 4510 - DNA, 20 bp, Artificial Sequence
  Description of Artificial Sequence: Synthetic oligonucleotide
cagtaagttttaaataacca

SEQ ID NO: 4511 - DNA, 20 bp, Artificial Sequence
  Description of Artificial Sequence: Synthetic oligonucleotide
tcagtaagttttaaataacc

SEQ ID NO: 4512 - DNA, 20 bp, Artificial Sequence
  Description of Artificial Sequence: Synthetic oligonucleotide
gtcagtaagttttaaataac

SEQ ID NO: 4513 - DNA, 20 bp, Artificial Sequence
  Description of Artificial Sequence: Synthetic oligonucleotide
tgtcagtaagttttaaataa

SEQ ID NO: 4514 - DNA, 20 bp, Artificial Sequence
  Description of Artificial Sequence: Synthetic oligonucleotide
ttgtcagtaagttttaaata

SEQ ID NO: 4515 - DNA, 20 bp, Artificial Sequence
  Description of Artificial Sequence: Synthetic oligonucleotide
attgtcagtaagttttaaat

SEQ ID NO: 4516 - DNA, 20 bp, Artificial Sequence
  Description of Artificial Sequence: Synthetic oligonucleotide
cattgtcagtaagttttaaa

SEQ ID NO: 4517 - DNA, 20 bp, Artificial Sequence
  Description of Artificial Sequence: Synthetic oligonucleotide
acattgtcagtaagttttaa

SEQ ID NO: 4518 - DNA, 20 bp, Artificial Sequence
  Description of Artificial Sequence: Synthetic oligonucleotide
agtgcacaaaagttagcagc

SEQ ID NO: 4519 - DNA, 20 bp, Artificial Sequence
  Description of Artificial Sequence: Synthetic oligonucleotide
tttccactacttcttcagag

SEQ ID NO: 4520 - DNA, 20 bp, Artificial Sequence
  Description of Artificial Sequence: Synthetic oligonucleotide
ttttccactacttcttcaga

SEQ ID NO: 4521 - DNA, 20 bp, Artificial Sequence
  Description of Artificial Sequence: Synthetic oligonucleotide
attttccactacttcttcag

SEQ ID NO: 4522 - DNA, 20 bp, Artificial Sequence
  Description of Artificial Sequence: Synthetic oligonucleotide
gattttccactacttcttca

SEQ ID NO: 4523 - DNA, 20 bp, Artificial Sequence
  Description of Artificial Sequence: Synthetic oligonucleotide
ggattttccactacttcttc

SEQ ID NO: 4524 - DNA, 20 bp, Artificial Sequence
  Description of Artificial Sequence: Synthetic oligonucleotide
aggattttccactacttctt

SEQ ID NO: 4525 - DNA, 20 bp, Artificial Sequence
  Description of Artificial Sequence: Synthetic oligonucleotide
taggattttccactacttct

SEQ ID NO: 4526 - DNA, 20 bp, Artificial Sequence
  Description of Artificial Sequence: Synthetic oligonucleotide
gtaggattttccactacttc

SEQ ID NO: 4527 - DNA, 20 bp, Artificial Sequence
  Description of Artificial Sequence: Synthetic oligonucleotide
ggtaggattttccactactt

SEQ ID NO: 4528 - DNA, 20 bp, Artificial Sequence
  Description of Artificial Sequence: Synthetic oligonucleotide
acaacttcggtagttttcac

SEQ ID NO: 4529 - DNA, 20 bp, Artificial Sequence
  Description of Artificial Sequence: Synthetic oligonucleotide
tacaacttcggtagttttca

SEQ ID NO: 4530 - DNA, 20 bp, Artificial Sequence
  Description of Artificial Sequence: Synthetic oligonucleotide
ctacaacttcggtagttttc

SEQ ID NO: 4531 - DNA, 20 bp, Artificial Sequence
  Description of Artificial Sequence: Synthetic oligonucleotide
cctacaacttcggtagtttt

SEQ ID NO: 4532 - DNA, 20 bp, Artificial Sequence
  Description of Artificial Sequence: Synthetic oligonucleotide
ccattaacaatagttgtaca

SEQ ID NO: 4533 - DNA, 20 bp, Artificial Sequence
  Description of Artificial Sequence: Synthetic oligonucleotide
aaaccaacactaccacatga

SEQ ID NO: 4534 - DNA, 20 bp, Artificial Sequence
  Description of Artificial Sequence: Synthetic oligonucleotide
aaaaccaacactaccacatg

SEQ ID NO: 4535 - DNA, 20 bp, Artificial Sequence
  Description of Artificial Sequence: Synthetic oligonucleotide
taaaaccaacactaccacat

SEQ ID NO: 4536 - DNA, 20 bp, Artificial Sequence
  Description of Artificial Sequence: Synthetic oligonucleotide
ttaaaaccaacactaccaca

SEQ ID NO: 4537 - DNA, 20 bp, Artificial Sequence
  Description of Artificial Sequence: Synthetic oligonucleotide
gttaaaaccaacactaccac

SEQ ID NO: 4538 - DNA, 20 bp, Artificial Sequence
  Description of Artificial Sequence: Synthetic oligonucleotide
tgttaaaaccaacactacca

SEQ ID NO: 4539 - DNA, 20 bp, Artificial Sequence
  Description of Artificial Sequence: Synthetic oligonucleotide
atgttaaaaccaacactacc

SEQ ID NO: 4540 - DNA, 20 bp, Artificial Sequence
  Description of Artificial Sequence: Synthetic oligonucleotide
tagcctaagaaacaataaac

SEQ ID NO: 4541 - DNA, 20 bp, Artificial Sequence
  Description of Artificial Sequence: Synthetic oligonucleotide
atagcctaagaaacaataaa

SEQ ID NO: 4542 - DNA, 20 bp, Artificial Sequence
  Description of Artificial Sequence: Synthetic oligonucleotide
aatagcctaagaaacaataa

SEQ ID NO: 4543 - DNA, 20 bp, Artificial Sequence
  Description of Artificial Sequence: Synthetic oligonucleotide
gacattttagactgtacagt

SEQ ID NO: 4544 - DNA, 20 bp, Artificial Sequence
  Description of Artificial Sequence: Synthetic oligonucleotide
tctacagcaccctgcatgga

SEQ ID NO: 4545 - DNA, 20 bp, Artificial Sequence
  Description of Artificial Sequence: Synthetic oligonucleotide
gtctacagcaccctgcatgg

SEQ ID NO: 4546 - DNA, 20 bp, Artificial Sequence
  Description of Artificial Sequence: Synthetic oligonucleotide
tgtctacagcaccctgcatg

SEQ ID NO: 4547 - DNA, 20 bp, Artificial Sequence
  Description of Artificial Sequence: Synthetic oligonucleotide
atgtctacagcaccctgcat

SEQ ID NO: 4548 - DNA, 20 bp, Artificial Sequence
  Description of Artificial Sequence: Synthetic oligonucleotide
gatttagccacattcaaaga

SEQ ID NO: 4549 - DNA, 20 bp, Artificial Sequence
  Description of Artificial Sequence: Synthetic oligonucleotide
agatttagccacattcaaag

SEQ ID NO: 4550 - DNA, 20 bp, Artificial Sequence
  Description of Artificial Sequence: Synthetic oligonucleotide
cagatttagccacattcaaa

SEQ ID NO: 4551 - DNA, 20 bp, Artificial Sequence
  Description of Artificial Sequence: Synthetic oligonucleotide
tcagatttagccacattcaa

SEQ ID NO: 4552 - DNA, 20 bp, Artificial Sequence
  Description of Artificial Sequence: Synthetic oligonucleotide
gcattgttgataatgttgtt

SEQ ID NO: 4553 - DNA, 20 bp, Artificial Sequence
  Description of Artificial Sequence: Synthetic oligonucleotide
ttagggaatctagcccattt

SEQ ID NO: 4554 - DNA, 20 bp, Artificial Sequence
  Description of Artificial Sequence: Synthetic oligonucleotide
cttagggaatctagcccatt

SEQ ID NO: 4555 - DNA, 20 bp, Artificial Sequence
  Description of Artificial Sequence: Synthetic oligonucleotide
tcttagggaatctagcccat

SEQ ID NO: 4556 - DNA, 20 bp, Artificial Sequence
  Description of Artificial Sequence: Synthetic oligonucleotide
ctcttagggaatctagccca

SEQ ID NO: 4557 - DNA, 20 bp, Artificial Sequence
  Description of Artificial Sequence: Synthetic oligonucleotide
actcttagggaatctagccc

SEQ ID NO: 4558 - DNA, 20 bp, Artificial Sequence
  Description of Artificial Sequence: Synthetic oligonucleotide
cactcttagggaatctagcc

SEQ ID NO: 4559 - DNA, 20 bp, Artificial Sequence
  Description of Artificial Sequence: Synthetic oligonucleotide
tcactcttagggaatctagc

SEQ ID NO: 4560 - DNA, 20 bp, Artificial Sequence
  Description of Artificial Sequence: Synthetic oligonucleotide
atcactcttagggaatctag

SEQ ID NO: 4561 - DNA, 20 bp, Artificial Sequence
  Description of Artificial Sequence: Synthetic oligonucleotide
catcactcttagggaatcta

SEQ ID NO: 4562 - DNA, 20 bp, Artificial Sequence
  Description of Artificial Sequence: Synthetic oligonucleotide
ccatcactcttagggaatct

SEQ ID NO: 4563 - DNA, 20 bp, Artificial Sequence
  Description of Artificial Sequence: Synthetic oligonucleotide
acaaggtggttccagttctg

SEQ ID NO: 4564 - DNA, 20 bp, Artificial Sequence
  Description of Artificial Sequence: Synthetic oligonucleotide
tacaaggtggttccagttct

SEQ ID NO: 4565 - DNA, 20 bp, Artificial Sequence
  Description of Artificial Sequence: Synthetic oligonucleotide
ctacaaggtggttccagttc

SEQ ID NO: 4566 - DNA, 20 bp, Artificial Sequence
  Description of Artificial Sequence: Synthetic oligonucleotide
cctacaaggtggttccagtt

SEQ ID NO: 4567 - DNA, 20 bp, Artificial Sequence
  Description of Artificial Sequence: Synthetic oligonucleotide
acctacaaggtggttccagt

SEQ ID NO: 4568 - DNA, 20 bp, Artificial Sequence
  Description of Artificial Sequence: Synthetic oligonucleotide
aacctacaaggtggttccag

SEQ ID NO: 4569 - DNA, 20 bp, Artificial Sequence
  Description of Artificial Sequence: Synthetic oligonucleotide
aaacctacaaggtggttcca

SEQ ID NO: 4570 - DNA, 20 bp, Artificial Sequence
  Description of Artificial Sequence: Synthetic oligonucleotide
caaacctacaaggtggttcc

SEQ ID NO: 4571 - DNA, 20 bp, Artificial Sequence
  Description of Artificial Sequence: Synthetic oligonucleotide
acaaacctacaaggtggttc

SEQ ID NO: 4572 - DNA, 20 bp, Artificial Sequence
  Description of Artificial Sequence: Synthetic oligonucleotide
aacaaacctacaaggtggtt

SEQ ID NO: 4573 - DNA, 20 bp, Artificial Sequence
  Description of Artificial Sequence: Synthetic oligonucleotide
taacaaacctacaaggtggt

SEQ ID NO: 4574 - DNA, 20 bp, Artificial Sequence
  Description of Artificial Sequence: Synthetic oligonucleotide
gtaacaaacctacaaggtgg

SEQ ID NO: 4575 - DNA, 20 bp, Artificial Sequence
  Description of Artificial Sequence: Synthetic oligonucleotide
tgtaacaaacctacaaggtg

SEQ ID NO: 4576 - DNA, 20 bp, Artificial Sequence
  Description of Artificial Sequence: Synthetic oligonucleotide
ctgtaacaaacctacaaggt

SEQ ID NO: 4577 - DNA, 20 bp, Artificial Sequence
  Description of Artificial Sequence: Synthetic oligonucleotide
tctgtaacaaacctacaagg

SEQ ID NO: 4578 - DNA, 20 bp, Artificial Sequence
  Description of Artificial Sequence: Synthetic oligonucleotide
gtctgtaacaaacctacaag

SEQ ID NO: 4579 - DNA, 20 bp, Artificial Sequence
  Description of Artificial Sequence: Synthetic oligonucleotide
tgtctgtaacaaacctacaa

SEQ ID NO: 4580 - DNA, 20 bp, Artificial Sequence
  Description of Artificial Sequence: Synthetic oligonucleotide
gtgtctgtaacaaacctaca

SEQ ID NO: 4581 - DNA, 20 bp, Artificial Sequence
  Description of Artificial Sequence: Synthetic oligonucleotide
tgtgtctgtaacaaacctac

SEQ ID NO: 4582 - DNA, 20 bp, Artificial Sequence
  Description of Artificial Sequence: Synthetic oligonucleotide
gtgtgtctgtaacaaaccta

SEQ ID NO: 4583 - DNA, 20 bp, Artificial Sequence
  Description of Artificial Sequence: Synthetic oligonucleotide
ggtgtgtctgtaacaaacct

SEQ ID NO: 4584 - DNA, 20 bp, Artificial Sequence
  Description of Artificial Sequence: Synthetic oligonucleotide
acctctatttaggttgttta

SEQ ID NO: 4585 - DNA, 20 bp, Artificial Sequence
  Description of Artificial Sequence: Synthetic oligonucleotide
tacctctatttaggttgttt

SEQ ID NO: 4586 - DNA, 20 bp, Artificial Sequence
  Description of Artificial Sequence: Synthetic oligonucleotide
atacctctatttaggttgtt

SEQ ID NO: 4587 - DNA, 20 bp, Artificial Sequence
  Description of Artificial Sequence: Synthetic oligonucleotide
catacctctatttaggttgt

SEQ ID NO: 4588 - DNA, 20 bp, Artificial Sequence
  Description of Artificial Sequence: Synthetic oligonucleotide
ccatacctctatttaggttg

SEQ ID NO: 4589 - DNA, 20 bp, Artificial Sequence
  Description of Artificial Sequence: Synthetic oligonucleotide
accatacctctatttaggtt

SEQ ID NO: 4590 - DNA, 20 bp, Artificial Sequence
  Description of Artificial Sequence: Synthetic oligonucleotide
gtgtgtgtacacaacatctt

SEQ ID NO: 4591 - DNA, 20 bp, Artificial Sequence
  Description of Artificial Sequence: Synthetic oligonucleotide
agtgtgtgtacacaacatct

SEQ ID NO: 4592 - DNA, 20 bp, Artificial Sequence
  Description of Artificial Sequence: Synthetic oligonucleotide
cagtgtgtgtacacaacatc

SEQ ID NO: 4593 - DNA, 20 bp, Artificial Sequence
  Description of Artificial Sequence: Synthetic oligonucleotide
ccagtgtgtgtacacaacat

SEQ ID NO: 4594 - DNA, 20 bp, Artificial Sequence
  Description of Artificial Sequence: Synthetic oligonucleotide
accagtgtgtgtacacaaca

SEQ ID NO: 4595 - DNA, 20 bp, Artificial Sequence
  Description of Artificial Sequence: Synthetic oligonucleotide
taccagtgtgtgtacacaac

SEQ ID NO: 4596 - DNA, 20 bp, Artificial Sequence
  Description of Artificial Sequence: Synthetic oligonucleotide
gtaccagtgtgtgtacacaa

SEQ ID NO: 4597 - DNA, 20 bp, Artificial Sequence
  Description of Artificial Sequence: Synthetic oligonucleotide
agacggtacagactgtgttt

SEQ ID NO: 4598 - DNA, 20 bp, Artificial Sequence
  Description of Artificial Sequence: Synthetic oligonucleotide
cagacggtacagactgtgtt

SEQ ID NO: 4599 - DNA, 20 bp, Artificial Sequence
  Description of Artificial Sequence: Synthetic oligonucleotide
gcagacggtacagactgtgt

SEQ ID NO: 4600 - DNA, 20 bp, Artificial Sequence
  Description of Artificial Sequence: Synthetic oligonucleotide
cgcagacggtacagactgtg

SEQ ID NO: 4601 - DNA, 20 bp, Artificial Sequence
  Description of Artificial Sequence: Synthetic oligonucleotide
ccgcagacggtacagactgt

SEQ ID NO: 4602 - DNA, 20 bp, Artificial Sequence
  Description of Artificial Sequence: Synthetic oligonucleotide
cagccataacctttccacat

SEQ ID NO: 4603 - DNA, 20 bp, Artificial Sequence
  Description of Artificial Sequence: Synthetic oligonucleotide
acagccataacctttccaca

SEQ ID NO: 4604 - DNA, 20 bp, Artificial Sequence
  Description of Artificial Sequence: Synthetic oligonucleotide
tacagccataacctttccac

SEQ ID NO: 4605 - DNA, 20 bp, Artificial Sequence
  Description of Artificial Sequence: Synthetic oligonucleotide
ctacagccataacctttcca

SEQ ID NO: 4606 - DNA, 20 bp, Artificial Sequence
  Description of Artificial Sequence: Synthetic oligonucleotide
actacagccataacctttcc

SEQ ID NO: 4607 - DNA, 20 bp, Artificial Sequence
  Description of Artificial Sequence: Synthetic oligonucleotide
aactacagccataacctttc

SEQ ID NO: 4608 - DNA, 20 bp, Artificial Sequence
  Description of Artificial Sequence: Synthetic oligonucleotide
caactacagccataaccttt

SEQ ID NO: 4609 - DNA, 20 bp, Artificial Sequence
  Description of Artificial Sequence: Synthetic oligonucleotide
acaactacagccataacctt

SEQ ID NO: 4610 - DNA, 20 bp, Artificial Sequence
  Description of Artificial Sequence: Synthetic oligonucleotide
cacaactacagccataacct

SEQ ID NO: 4611 - DNA, 20 bp, Artificial Sequence
  Description of Artificial Sequence: Synthetic oligonucleotide
tcacaactacagccataacc

SEQ ID NO: 4612 - DNA, 20 bp, Artificial Sequence
  Description of Artificial Sequence: Synthetic oligonucleotide
cgcaaacccgtttaaaaacg

SEQ ID NO: 4613 - DNA, 20 bp, Artificial Sequence
  Description of Artificial Sequence: Synthetic oligonucleotide
ccgcaaacccgtttaaaaac

SEQ ID NO: 4614 - DNA, 20 bp, Artificial Sequence
  Description of Artificial Sequence: Synthetic oligonucleotide
accgcaaacccgtttaaaaa

SEQ ID NO: 4615 - DNA, 20 bp, Artificial Sequence
  Description of Artificial Sequence: Synthetic oligonucleotide
caccgcaaacccgtttaaaa

SEQ ID NO: 4616 - DNA, 20 bp, Artificial Sequence
  Description of Artificial Sequence: Synthetic oligonucleotide
acaccgcaaacccgtttaaa

SEQ ID NO: 4617 - DNA, 20 bp, Artificial Sequence
  Description of Artificial Sequence: Synthetic oligonucleotide
tacaccgcaaacccgtttaa

SEQ ID NO: 4618 - DNA, 20 bp, Artificial Sequence
  Description of Artificial Sequence: Synthetic oligonucleotide
ttacaccgcaaacccgttta

SEQ ID NO: 4619 - DNA, 20 bp, Artificial Sequence
  Description of Artificial Sequence: Synthetic oligonucleotide
cttacaccgcaaacccgttt

SEQ ID NO: 4620 - DNA, 20 bp, Artificial Sequence
  Description of Artificial Sequence: Synthetic oligonucleotide
acttacaccgcaaacccgtt

SEQ ID NO: 4621 - DNA, 20 bp, Artificial Sequence
  Description of Artificial Sequence: Synthetic oligonucleotide
cacttacaccgcaaacccgt

SEQ ID NO: 4622 - DNA, 20 bp, Artificial Sequence
  Description of Artificial Sequence: Synthetic oligonucleotide
gcacttacaccgcaaacccg

SEQ ID NO: 4623 - DNA, 20 bp, Artificial Sequence
  Description of Artificial Sequence: Synthetic oligonucleotide
tgcacttacaccgcaaaccc

SEQ ID NO: 4624 - DNA, 20 bp, Artificial Sequence
  Description of Artificial Sequence: Synthetic oligonucleotide
ctgcacttacaccgcaaacc

SEQ ID NO: 4625 - DNA, 20 bp, Artificial Sequence
  Description of Artificial Sequence: Synthetic oligonucleotide
gctgcacttacaccgcaaac

SEQ ID NO: 4626 - DNA, 20 bp, Artificial Sequence
  Description of Artificial Sequence: Synthetic oligonucleotide
ggctgcacttacaccgcaaa

SEQ ID NO: 4627 - DNA, 20 bp, Artificial Sequence
  Description of Artificial Sequence: Synthetic oligonucleotide
gggctgcacttacaccgcaa

SEQ ID NO: 4628 - DNA, 20 bp, Artificial Sequence
  Description of Artificial Sequence: Synthetic oligonucleotide
cgggctgcacttacaccgca

SEQ ID NO: 4629 - DNA, 20 bp, Artificial Sequence
  Description of Artificial Sequence: Synthetic oligonucleotide
acgggctgcacttacaccgc

SEQ ID NO: 4630 - DNA, 20 bp, Artificial Sequence
  Description of Artificial Sequence: Synthetic oligonucleotide
gacgggctgcacttacaccg

SEQ ID NO: 4631 - DNA, 20 bp, Artificial Sequence
  Description of Artificial Sequence: Synthetic oligonucleotide
agacgggctgcacttacacc

SEQ ID NO: 4632 - DNA, 20 bp, Artificial Sequence
  Description of Artificial Sequence: Synthetic oligonucleotide
aagacgggctgcacttacac

SEQ ID NO: 4633 - DNA, 20 bp, Artificial Sequence
  Description of Artificial Sequence: Synthetic oligonucleotide
taagacgggctgcacttaca

SEQ ID NO: 4634 - DNA, 20 bp, Artificial Sequence
  Description of Artificial Sequence: Synthetic oligonucleotide
gtaagacgggctgcacttac

SEQ ID NO: 4635 - DNA, 20 bp, Artificial Sequence
  Description of Artificial Sequence: Synthetic oligonucleotide
tgtaagacgggctgcactta

SEQ ID NO: 4636 - DNA, 20 bp, Artificial Sequence
  Description of Artificial Sequence: Synthetic oligonucleotide
gtgtaagacgggctgcactt

SEQ ID NO: 4637 - DNA, 20 bp, Artificial Sequence
  Description of Artificial Sequence: Synthetic oligonucleotide
ggtgtaagacgggctgcact

SEQ ID NO: 4638 - DNA, 20 bp, Artificial Sequence
  Description of Artificial Sequence: Synthetic oligonucleotide
cggtgtaagacgggctgcac

SEQ ID NO: 4639 - DNA, 20 bp, Artificial Sequence
  Description of Artificial Sequence: Synthetic oligonucleotide
acggtgtaagacgggctgca

SEQ ID NO: 4640 - DNA, 20 bp, Artificial Sequence
  Description of Artificial Sequence: Synthetic oligonucleotide
cacggtgtaagacgggctgc

SEQ ID NO: 4641 - DNA, 20 bp, Artificial Sequence
  Description of Artificial Sequence: Synthetic oligonucleotide
gcacggtgtaagacgggctg

SEQ ID NO: 4642 - DNA, 20 bp, Artificial Sequence
  Description of Artificial Sequence: Synthetic oligonucleotide
cgcacggtgtaagacgggct

SEQ ID NO: 4643 - DNA, 20 bp, Artificial Sequence
  Description of Artificial Sequence: Synthetic oligonucleotide
ccgcacggtgtaagacgggc

SEQ ID NO: 4644 - DNA, 20 bp, Artificial Sequence
  Description of Artificial Sequence: Synthetic oligonucleotide
gccgcacggtgtaagacggg

SEQ ID NO: 4645 - DNA, 20 bp, Artificial Sequence
  Description of Artificial Sequence: Synthetic oligonucleotide
tgccgcacggtgtaagacgg

SEQ ID NO: 4646 - DNA, 20 bp, Artificial Sequence
  Description of Artificial Sequence: Synthetic oligonucleotide
gtgccgcacggtgtaagacg

SEQ ID NO: 4647 - DNA, 20 bp, Artificial Sequence
  Description of Artificial Sequence: Synthetic oligonucleotide
tgtgccgcacggtgtaagac

SEQ ID NO: 4648 - DNA, 20 bp, Artificial Sequence
  Description of Artificial Sequence: Synthetic oligonucleotide
ctgtgccgcacggtgtaaga

SEQ ID NO: 4649 - DNA, 20 bp, Artificial Sequence
  Description of Artificial Sequence: Synthetic oligonucleotide
cctgtgccgcacggtgtaag

SEQ ID NO: 4650 - DNA, 20 bp, Artificial Sequence
  Description of Artificial Sequence: Synthetic oligonucleotide
gcctgtgccgcacggtgtaa

SEQ ID NO: 4651 - DNA, 20 bp, Artificial Sequence
  Description of Artificial Sequence: Synthetic oligonucleotide
tgcctgtgccgcacggtgta

SEQ ID NO: 4652 - DNA, 20 bp, Artificial Sequence
  Description of Artificial Sequence: Synthetic oligonucleotide
gtgcctgtgccgcacggtgt

SEQ ID NO: 4653 - DNA, 20 bp, Artificial Sequence
  Description of Artificial Sequence: Synthetic oligonucleotide
agtgcctgtgccgcacggtg

SEQ ID NO: 4654 - DNA, 20 bp, Artificial Sequence
  Description of Artificial Sequence: Synthetic oligonucleotide
tagtgcctgtgccgcacggt

SEQ ID NO: 4655 - DNA, 20 bp, Artificial Sequence
  Description of Artificial Sequence: Synthetic oligonucleotide
ctagtgcctgtgccgcacgg

SEQ ID NO: 4656 - DNA, 20 bp, Artificial Sequence
  Description of Artificial Sequence: Synthetic oligonucleotide
atatgtggtaccatgtcacc

SEQ ID NO: 4657 - DNA, 20 bp, Artificial Sequence
  Description of Artificial Sequence: Synthetic oligonucleotide
tatatgtggtaccatgtcac

SEQ ID NO: 4658 - DNA, 20 bp, Artificial Sequence
  Description of Artificial Sequence: Synthetic oligonucleotide
atatatgtggtaccatgtca

SEQ ID NO: 4659 - DNA, 20 bp, Artificial Sequence
  Description of Artificial Sequence: Synthetic oligonucleotide
gatatatgtggtaccatgtc

SEQ ID NO: 4660 - DNA, 20 bp, Artificial Sequence
  Description of Artificial Sequence: Synthetic oligonucleotide
tgatatatgtggtaccatgt

SEQ ID NO: 4661 - DNA, 20 bp, Artificial Sequence
  Description of Artificial Sequence: Synthetic oligonucleotide
gtgatatatgtggtaccatg

SEQ ID NO: 4662 - DNA, 20 bp, Artificial Sequence
  Description of Artificial Sequence: Synthetic oligonucleotide
cgtgatatatgtggtaccat

SEQ ID NO: 4663 - DNA, 20 bp, Artificial Sequence
  Description of Artificial Sequence: Synthetic oligonucleotide
acgtgatatatgtggtacca

SEQ ID NO: 4664 - DNA, 20 bp, Artificial Sequence
  Description of Artificial Sequence: Synthetic oligonucleotide
gacgtgatatatgtggtacc

SEQ ID NO: 4665 - DNA, 20 bp, Artificial Sequence
  Description of Artificial Sequence: Synthetic oligonucleotide
tgacgtgatatatgtggtac

SEQ ID NO: 4666 - DNA, 20 bp, Artificial Sequence
  Description of Artificial Sequence: Synthetic oligonucleotide
caatatttaaaataacggtc

SEQ ID NO: 4667 - DNA, 20 bp, Artificial Sequence
  Description of Artificial Sequence: Synthetic oligonucleotide
ccaatatttaaaataacggt

SEQ ID NO: 4668 - DNA, 20 bp, Artificial Sequence
  Description of Artificial Sequence: Synthetic oligonucleotide
cccaatatttaaaataacgg

SEQ ID NO: 4669 - DNA, 20 bp, Artificial Sequence
  Description of Artificial Sequence: Synthetic oligonucleotide
tcccaatatttaaaataacg

SEQ ID NO: 4670 - DNA, 20 bp, Artificial Sequence
  Description of Artificial Sequence: Synthetic oligonucleotide
ggtccaaaacttgtaggtgg

SEQ ID NO: 4671 - DNA, 20 bp, Artificial Sequence
  Description of Artificial Sequence: Synthetic oligonucleotide
tggtccaaaacttgtaggtg

SEQ ID NO: 4672 - DNA, 20 bp, Artificial Sequence
  Description of Artificial Sequence: Synthetic oligonucleotide
gtggtccaaaacttgtaggt

SEQ ID NO: 4673 - DNA, 20 bp, Artificial Sequence
  Description of Artificial Sequence: Synthetic oligonucleotide
agtggtccaaaacttgtagg

SEQ ID NO: 4674 - DNA, 20 bp, Artificial Sequence
  Description of Artificial Sequence: Synthetic oligonucleotide
tagtggtccaaaacttgtag

SEQ ID NO: 4675 - DNA, 20 bp, Artificial Sequence
  Description of Artificial Sequence: Synthetic oligonucleotide
ctagtggtccaaaacttgta

SEQ ID NO: 4676 - DNA, 20 bp, Artificial Sequence
  Description of Artificial Sequence: Synthetic oligonucleotide
actagtggtccaaaacttgt

SEQ ID NO: 4677 - DNA, 20 bp, Artificial Sequence
  Description of Artificial Sequence: Synthetic oligonucleotide
tttacatcctgattatgtac

SEQ ID NO: 4678 - DNA, 20 bp, Artificial Sequence
  Description of Artificial Sequence: Synthetic oligonucleotide
gtttacatcctgattatgta

SEQ ID NO: 4679 - DNA, 20 bp, Artificial Sequence
  Description of Artificial Sequence: Synthetic oligonucleotide
agtttacatcctgattatgt

SEQ ID NO: 4680 - DNA, 20 bp, Artificial Sequence
  Description of Artificial Sequence: Synthetic oligonucleotide
aagtttacatcctgattatg

SEQ ID NO: 4681 - DNA, 20 bp, Artificial Sequence
  Description of Artificial Sequence: Synthetic oligonucleotide
taagtttacatcctgattat

SEQ ID NO: 4682 - DNA, 20 bp, Artificial Sequence
  Description of Artificial Sequence: Synthetic oligonucleotide
gtaagtttacatcctgatta

SEQ ID NO: 4683 - DNA, 20 bp, Artificial Sequence
  Description of Artificial Sequence: Synthetic oligonucleotide
tgtaagtttacatcctgatt

SEQ ID NO: 4684 - DNA, 20 bp, Artificial Sequence
  Description of Artificial Sequence: Synthetic oligonucleotide
atgtaagtttacatcctgat

SEQ ID NO: 4685 - DNA, 20 bp, Artificial Sequence
  Description of Artificial Sequence: Synthetic oligonucleotide
tatgtaagtttacatcctga

SEQ ID NO: 4686 - DNA, 20 bp, Artificial Sequence
  Description of Artificial Sequence: Synthetic oligonucleotide
ctatgtaagtttacatcctg

SEQ ID NO: 4687 - DNA, 20 bp, Artificial Sequence
  Description of Artificial Sequence: Synthetic oligonucleotide
gctatgtaagtttacatcct

SEQ ID NO: 4688 - DNA, 20 bp, Artificial Sequence
  Description of Artificial Sequence: Synthetic oligonucleotide
agctatgtaagtttacatcc

SEQ ID NO: 4689 - DNA, 20 bp, Artificial Sequence
  Description of Artificial Sequence: Synthetic oligonucleotide
gagctatgtaagtttacatc

SEQ ID NO: 4690 - DNA, 20 bp, Artificial Sequence
  Description of Artificial Sequence: Synthetic oligonucleotide
agtgcagctactgaaaagca

SEQ ID NO: 4691 - DNA, 20 bp, Artificial Sequence
  Description of Artificial Sequence: Synthetic oligonucleotide
acagtttgaaaagcaacatt

SEQ ID NO: 4692 - DNA, 20 bp, Artificial Sequence
  Description of Artificial Sequence: Synthetic oligonucleotide
gacagtttgaaaagcaacat

SEQ ID NO: 4693 - DNA, 20 bp, Artificial Sequence
  Description of Artificial Sequence: Synthetic oligonucleotide
tgacagtttgaaaagcaaca

SEQ ID NO: 4694 - DNA, 20 bp, Artificial Sequence
  Description of Artificial Sequence: Synthetic oligonucleotide
ttgacagtttgaaaagcaac

SEQ ID NO: 4695 - DNA, 20 bp, Artificial Sequence
  Description of Artificial Sequence: Synthetic oligonucleotide
tttgacagtttgaaaagcaa

SEQ ID NO: 4696 - DNA, 20 bp, Artificial Sequence
  Description of Artificial Sequence: Synthetic oligonucleotide
gtttgacagtttgaaaagca

SEQ ID NO: 4697 - DNA, 20 bp, Artificial Sequence
  Description of Artificial Sequence: Synthetic oligonucleotide
ggtttgacagtttgaaaagc

SEQ ID NO: 4698 - DNA, 20 bp, Artificial Sequence
  Description of Artificial Sequence: Synthetic oligonucleotide
gggtttgacagtttgaaaag

SEQ ID NO: 4699 - DNA, 20 bp, Artificial Sequence
  Description of Artificial Sequence: Synthetic oligonucleotide
cgggtttgacagtttgaaaa

SEQ ID NO: 4700 - DNA, 20 bp, Artificial Sequence
  Description of Artificial Sequence: Synthetic oligonucleotide
ccgggtttgacagtttgaaa

SEQ ID NO: 4701 - DNA, 20 bp, Artificial Sequence
  Description of Artificial Sequence: Synthetic oligonucleotide
accgggtttgacagtttgaa

SEQ ID NO: 4702 - DNA, 20 bp, Artificial Sequence
  Description of Artificial Sequence: Synthetic oligonucleotide
taccgggtttgacagtttga

SEQ ID NO: 4703 - DNA, 20 bp, Artificial Sequence
  Description of Artificial Sequence: Synthetic oligonucleotide
ttaccgggtttgacagtttg

SEQ ID NO: 4704 - DNA, 20 bp, Artificial Sequence
  Description of Artificial Sequence: Synthetic oligonucleotide
attaccgggtttgacagttt

SEQ ID NO: 4705 - DNA, 20 bp, Artificial Sequence
  Description of Artificial Sequence: Synthetic oligonucleotide
aattaccgggtttgacagtt

SEQ ID NO: 4706 - DNA, 20 bp, Artificial Sequence
  Description of Artificial Sequence: Synthetic oligonucleotide
aaattaccgggtttgacagt

SEQ ID NO: 4707 - DNA, 20 bp, Artificial Sequence
  Description of Artificial Sequence: Synthetic oligonucleotide
aaaattaccgggtttgacag

SEQ ID NO: 4708 - DNA, 20 bp, Artificial Sequence
  Description of Artificial Sequence: Synthetic oligonucleotide
taaaattaccgggtttgaca

SEQ ID NO: 4709 - DNA, 20 bp, Artificial Sequence
  Description of Artificial Sequence: Synthetic oligonucleotide
ttaaaattaccgggtttgac

SEQ ID NO: 4710 - DNA, 20 bp, Artificial Sequence
  Description of Artificial Sequence: Synthetic oligonucleotide
ttagacacagcaaagtcata

SEQ ID NO: 4711 - DNA, 20 bp, Artificial Sequence
  Description of Artificial Sequence: Synthetic oligonucleotide
gaacttccttccttaaagaa

SEQ ID NO: 4712 - DNA, 20 bp, Artificial Sequence
  Description of Artificial Sequence: Synthetic oligonucleotide
agaacttccttccttaaaga

SEQ ID NO: 4713 - DNA, 20 bp, Artificial Sequence
  Description of Artificial Sequence: Synthetic oligonucleotide
cagaacttccttccttaaag

SEQ ID NO: 4714 - DNA, 20 bp, Artificial Sequence
  Description of Artificial Sequence: Synthetic oligonucleotide
acagaacttccttccttaaa

SEQ ID NO: 4715 - DNA, 20 bp, Artificial Sequence
  Description of Artificial Sequence: Synthetic oligonucleotide
aacagaacttccttccttaa

SEQ ID NO: 4716 - DNA, 20 bp, Artificial Sequence
  Description of Artificial Sequence: Synthetic oligonucleotide
caacagaacttccttcctta

SEQ ID NO: 4717 - DNA, 20 bp, Artificial Sequence
  Description of Artificial Sequence: Synthetic oligonucleotide
tcaacagaacttccttcctt

SEQ ID NO: 4718 - DNA, 20 bp, Artificial Sequence
  Description of Artificial Sequence: Synthetic oligonucleotide
ttcaacagaacttccttcct

SEQ ID NO: 4719 - DNA, 20 bp, Artificial Sequence
  Description of Artificial Sequence: Synthetic oligonucleotide
agcaaagaagaagtgtttta

SEQ ID NO: 4720 - DNA, 20 bp, Artificial Sequence
  Description of Artificial Sequence: Synthetic oligonucleotide
gagcaaagaagaagtgtttt

SEQ ID NO: 4721 - DNA, 20 bp, Artificial Sequence
  Description of Artificial Sequence: Synthetic oligonucleotide
tgagcaaagaagaagtgttt

SEQ ID NO: 4722 - DNA, 20 bp, Artificial Sequence
  Description of Artificial Sequence: Synthetic oligonucleotide
ctgagcaaagaagaagtgtt

SEQ ID NO: 4723 - DNA, 20 bp, Artificial Sequence
  Description of Artificial Sequence: Synthetic oligonucleotide
cctgagcaaagaagaagtgt

SEQ ID NO: 4724 - DNA, 20 bp, Artificial Sequence
  Description of Artificial Sequence: Synthetic oligonucleotide
tcctgagcaaagaagaagtg

SEQ ID NO: 4725 - DNA, 20 bp, Artificial Sequence
  Description of Artificial Sequence: Synthetic oligonucleotide
atcctgagcaaagaagaagt

SEQ ID NO: 4726 - DNA, 20 bp, Artificial Sequence
  Description of Artificial Sequence: Synthetic oligonucleotide
catcctgagcaaagaagaag

SEQ ID NO: 4727 - DNA, 20 bp, Artificial Sequence
  Description of Artificial Sequence: Synthetic oligonucleotide
ccatcctgagcaaagaagaa

SEQ ID NO: 4728 - DNA, 20 bp, Artificial Sequence
  Description of Artificial Sequence: Synthetic oligonucleotide
ctgatatcacacattgttgg

SEQ ID NO: 4729 - DNA, 20 bp, Artificial Sequence
  Description of Artificial Sequence: Synthetic oligonucleotide
tctgatatcacacattgttg

SEQ ID NO: 4730 - DNA, 20 bp, Artificial Sequence
  Description of Artificial Sequence: Synthetic oligonucleotide
gtctgatatcacacattgtt

SEQ ID NO: 4731 - DNA, 20 bp, Artificial Sequence
  Description of Artificial Sequence: Synthetic oligonucleotide
tgtctgatatcacacattgt

SEQ ID NO: 4732 - DNA, 20 bp, Artificial Sequence
  Description of Artificial Sequence: Synthetic oligonucleotide
ttgtctgatatcacacattg

SEQ ID NO: 4733 - DNA, 20 bp, Artificial Sequence
  Description of Artificial Sequence: Synthetic oligonucleotide
gttgtctgatatcacacatt

SEQ ID NO: 4734 - DNA, 20 bp, Artificial Sequence
  Description of Artificial Sequence: Synthetic oligonucleotide
agttgtctgatatcacacat

SEQ ID NO: 4735 - DNA, 20 bp, Artificial Sequence
  Description of Artificial Sequence: Synthetic oligonucleotide
ttatcaacaacttcaactac

SEQ ID NO: 4736 - DNA, 20 bp, Artificial Sequence
  Description of Artificial Sequence: Synthetic oligonucleotide
ccatcgtaacaatcaaagta

SEQ ID NO: 4737 - DNA, 20 bp, Artificial Sequence
  Description of Artificial Sequence: Synthetic oligonucleotide
accatcgtaacaatcaaagt

SEQ ID NO: 4738 - DNA, 20 bp, Artificial Sequence
  Description of Artificial Sequence: Synthetic oligonucleotide
caccatcgtaacaatcaaag

SEQ ID NO: 4739 - DNA, 20 bp, Artificial Sequence
  Description of Artificial Sequence: Synthetic oligonucleotide
ccaccatcgtaacaatcaaa

SEQ ID NO: 4740 - DNA, 20 bp, Artificial Sequence
  Description of Artificial Sequence: Synthetic oligonucleotide
gccaccatcgtaacaatcaa

SEQ ID NO: 4741 - DNA, 20 bp, Artificial Sequence
  Description of Artificial Sequence: Synthetic oligonucleotide
agccaccatcgtaacaatca

SEQ ID NO: 4742 - DNA, 20 bp, Artificial Sequence
  Description of Artificial Sequence: Synthetic oligonucleotide
cagccaccatcgtaacaatc

SEQ ID NO: 4743 - DNA, 20 bp, Artificial Sequence
  Description of Artificial Sequence: Synthetic oligonucleotide
acagccaccatcgtaacaat

SEQ ID NO: 4744 - DNA, 20 bp, Artificial Sequence
  Description of Artificial Sequence: Synthetic oligonucleotide
tacagccaccatcgtaacaa

SEQ ID NO: 4745 - DNA, 20 bp, Artificial Sequence
  Description of Artificial Sequence: Synthetic oligonucleotide
atacagccaccatcgtaaca

SEQ ID NO: 4746 - DNA, 20 bp, Artificial Sequence
  Description of Artificial Sequence: Synthetic oligonucleotide
agtctagccttaccccattt

SEQ ID NO: 4747 - DNA, 20 bp, Artificial Sequence
  Description of Artificial Sequence: Synthetic oligonucleotide
aagtctagccttaccccatt

SEQ ID NO: 4748 - DNA, 20 bp, Artificial Sequence
  Description of Artificial Sequence: Synthetic oligonucleotide
aaagtctagccttaccccat

SEQ ID NO: 4749 - DNA, 20 bp, Artificial Sequence
  Description of Artificial Sequence: Synthetic oligonucleotide
taaagtctagccttacccca

SEQ ID NO: 4750 - DNA, 20 bp, Artificial Sequence
  Description of Artificial Sequence: Synthetic oligonucleotide
ataaagtctagccttacccc

SEQ ID NO: 4751 - DNA, 20 bp, Artificial Sequence
  Description of Artificial Sequence: Synthetic oligonucleotide
aataaagtctagccttaccc

SEQ ID NO: 4752 - DNA, 20 bp, Artificial Sequence
  Description of Artificial Sequence: Synthetic oligonucleotide
taataaagtctagccttacc

SEQ ID NO: 4753 - DNA, 20 bp, Artificial Sequence
  Description of Artificial Sequence: Synthetic oligonucleotide
ataataaagtctagccttac

SEQ ID NO: 4754 - DNA, 20 bp, Artificial Sequence
  Description of Artificial Sequence: Synthetic oligonucleotide
cataataaagtctagcctta

SEQ ID NO: 4755 - DNA, 20 bp, Artificial Sequence
  Description of Artificial Sequence: Synthetic oligonucleotide
tcataataaagtctagcctt

SEQ ID NO: 4756 - DNA, 20 bp, Artificial Sequence
  Description of Artificial Sequence: Synthetic oligonucleotide
tgatcctcataactcattga

SEQ ID NO: 4757 - DNA, 20 bp, Artificial Sequence
  Description of Artificial Sequence: Synthetic oligonucleotide
ttgatcctcataactcattg

SEQ ID NO: 4758 - DNA, 20 bp, Artificial Sequence
  Description of Artificial Sequence: Synthetic oligonucleotide
cttgatcctcataactcatt

SEQ ID NO: 4759 - DNA, 20 bp, Artificial Sequence
  Description of Artificial Sequence: Synthetic oligonucleotide
tcttgatcctcataactcat

SEQ ID NO: 4760 - DNA, 20 bp, Artificial Sequence
  Description of Artificial Sequence: Synthetic oligonucleotide
atcttgatcctcataactca

SEQ ID NO: 4761 - DNA, 20 bp, Artificial Sequence
  Description of Artificial Sequence: Synthetic oligonucleotide
catcttgatcctcataactc

SEQ ID NO: 4762 - DNA, 20 bp, Artificial Sequence
  Description of Artificial Sequence: Synthetic oligonucleotide
gcatcttgatcctcataact

SEQ ID NO: 4763 - DNA, 20 bp, Artificial Sequence
  Description of Artificial Sequence: Synthetic oligonucleotide
tgcatcttgatcctcataac

SEQ ID NO: 4764 - DNA, 20 bp, Artificial Sequence
  Description of Artificial Sequence: Synthetic oligonucleotide
gtgcatcttgatcctcataa

SEQ ID NO: 4765 - DNA, 20 bp, Artificial Sequence
  Description of Artificial Sequence: Synthetic oligonucleotide
agtgcatcttgatcctcata

SEQ ID NO: 4766 - DNA, 20 bp, Artificial Sequence
  Description of Artificial Sequence: Synthetic oligonucleotide
ttaagattcatttgagttat

SEQ ID NO: 4767 - DNA, 20 bp, Artificial Sequence
  Description of Artificial Sequence: Synthetic oligonucleotide
cttaagattcatttgagtta

SEQ ID NO: 4768 - DNA, 20 bp, Artificial Sequence
  Description of Artificial Sequence: Synthetic oligonucleotide
acttaagattcatttgagtt

SEQ ID NO: 4769 - DNA, 20 bp, Artificial Sequence
  Description of Artificial Sequence: Synthetic oligonucleotide
tacttaagattcatttgagt

SEQ ID NO: 4770 - DNA, 20 bp, Artificial Sequence
  Description of Artificial Sequence: Synthetic oligonucleotide
atacttaagattcatttgag

SEQ ID NO: 4771 - DNA, 20 bp, Artificial Sequence
  Description of Artificial Sequence: Synthetic oligonucleotide
catacttaagattcatttga

SEQ ID NO: 4772 - DNA, 20 bp, Artificial Sequence
  Description of Artificial Sequence: Synthetic oligonucleotide
gcatacttaagattcatttg

SEQ ID NO: 4773 - DNA, 20 bp, Artificial Sequence
  Description of Artificial Sequence: Synthetic oligonucleotide
ggcatacttaagattcattt

SEQ ID NO: 4774 - DNA, 20 bp, Artificial Sequence
  Description of Artificial Sequence: Synthetic oligonucleotide
tggcatacttaagattcatt

SEQ ID NO: 4775 - DNA, 20 bp, Artificial Sequence
  Description of Artificial Sequence: Synthetic oligonucleotide
atggcatacttaagattcat

SEQ ID NO: 4776 - DNA, 20 bp, Artificial Sequence
  Description of Artificial Sequence: Synthetic oligonucleotide
aatggcatacttaagattca

SEQ ID NO: 4777 - DNA, 20 bp, Artificial Sequence
  Description of Artificial Sequence: Synthetic oligonucleotide
taatggcatacttaagattc

SEQ ID NO: 4778 - DNA, 20 bp, Artificial Sequence
  Description of Artificial Sequence: Synthetic oligonucleotide
ctaatggcatacttaagatt

SEQ ID NO: 4779 - DNA, 20 bp, Artificial Sequence
  Description of Artificial Sequence: Synthetic oligonucleotide
actaatggcatacttaagat

SEQ ID NO: 4780 - DNA, 20 bp, Artificial Sequence
  Description of Artificial Sequence: Synthetic oligonucleotide
cactaatggcatacttaaga

SEQ ID NO: 4781 - DNA, 20 bp, Artificial Sequence
  Description of Artificial Sequence: Synthetic oligonucleotide
gcactaatggcatacttaag

SEQ ID NO: 4782 - DNA, 20 bp, Artificial Sequence
  Description of Artificial Sequence: Synthetic oligonucleotide
tgcactaatggcatacttaa

SEQ ID NO: 4783 - DNA, 20 bp, Artificial Sequence
  Description of Artificial Sequence: Synthetic oligonucleotide
ttgcactaatggcatactta

SEQ ID NO: 4784 - DNA, 20 bp, Artificial Sequence
  Description of Artificial Sequence: Synthetic oligonucleotide
tttgcactaatggcatactt

SEQ ID NO: 4785 - DNA, 20 bp, Artificial Sequence
  Description of Artificial Sequence: Synthetic oligonucleotide
ctttgcactaatggcatact

SEQ ID NO: 4786 - DNA, 20 bp, Artificial Sequence
  Description of Artificial Sequence: Synthetic oligonucleotide
tctttgcactaatggcatac

SEQ ID NO: 4787 - DNA, 20 bp, Artificial Sequence
  Description of Artificial Sequence: Synthetic oligonucleotide
ttctttgcactaatggcata

SEQ ID NO: 4788 - DNA, 20 bp, Artificial Sequence
  Description of Artificial Sequence: Synthetic oligonucleotide
attctttgcactaatggcat

SEQ ID NO: 4789 - DNA, 20 bp, Artificial Sequence
  Description of Artificial Sequence: Synthetic oligonucleotide
tattctttgcactaatggca

SEQ ID NO: 4790 - DNA, 20 bp, Artificial Sequence
  Description of Artificial Sequence: Synthetic oligonucleotide
ctattctttgcactaatggc

SEQ ID NO: 4791 - DNA, 20 bp, Artificial Sequence
  Description of Artificial Sequence: Synthetic oligonucleotide
tctattctttgcactaatgg

SEQ ID NO: 4792 - DNA, 20 bp, Artificial Sequence
  Description of Artificial Sequence: Synthetic oligonucleotide
ctctattctttgcactaatg

SEQ ID NO: 4793 - DNA, 20 bp, Artificial Sequence
  Description of Artificial Sequence: Synthetic oligonucleotide
gctctattctttgcactaat

SEQ ID NO: 4794 - DNA, 20 bp, Artificial Sequence
  Description of Artificial Sequence: Synthetic oligonucleotide
agctctattctttgcactaa

SEQ ID NO: 4795 - DNA, 20 bp, Artificial Sequence
  Description of Artificial Sequence: Synthetic oligonucleotide
gagctctattctttgcacta

SEQ ID NO: 4796 - DNA, 20 bp, Artificial Sequence
  Description of Artificial Sequence: Synthetic oligonucleotide
cgagctctattctttgcact

SEQ ID NO: 4797 - DNA, 20 bp, Artificial Sequence
  Description of Artificial Sequence: Synthetic oligonucleotide
gcgagctctattctttgcac

SEQ ID NO: 4798 - DNA, 20 bp, Artificial Sequence
  Description of Artificial Sequence: Synthetic oligonucleotide
tgcgagctctattctttgca

SEQ ID NO: 4799 - DNA, 20 bp, Artificial Sequence
  Description of Artificial Sequence: Synthetic oligonucleotide
gtgcgagctctattctttgc

SEQ ID NO: 4800 - DNA, 20 bp, Artificial Sequence
  Description of Artificial Sequence: Synthetic oligonucleotide
ggtgcgagctctattctttg

SEQ ID NO: 4801 - DNA, 20 bp, Artificial Sequence
  Description of Artificial Sequence: Synthetic oligonucleotide
cggtgcgagctctattcttt

SEQ ID NO: 4802 - DNA, 20 bp, Artificial Sequence
  Description of Artificial Sequence: Synthetic oligonucleotide
acggtgcgagctctattctt

SEQ ID NO: 4803 - DNA, 20 bp, Artificial Sequence
  Description of Artificial Sequence: Synthetic oligonucleotide
tacggtgcgagctctattct

SEQ ID NO: 4804 - DNA, 20 bp, Artificial Sequence
  Description of Artificial Sequence: Synthetic oligonucleotide
ctacggtgcgagctctattc

SEQ ID NO: 4805 - DNA, 20 bp, Artificial Sequence
  Description of Artificial Sequence: Synthetic oligonucleotide
gctacggtgcgagctctatt

SEQ ID NO: 4806 - DNA, 20 bp, Artificial Sequence
  Description of Artificial Sequence: Synthetic oligonucleotide
agctacggtgcgagctctat

SEQ ID NO: 4807 - DNA, 20 bp, Artificial Sequence
  Description of Artificial Sequence: Synthetic oligonucleotide
cagctacggtgcgagctcta

SEQ ID NO: 4808 - DNA, 20 bp, Artificial Sequence
  Description of Artificial Sequence: Synthetic oligonucleotide
ccagctacggtgcgagctct

SEQ ID NO: 4809 - DNA, 20 bp, Artificial Sequence
  Description of Artificial Sequence: Synthetic oligonucleotide
accagctacggtgcgagctc

SEQ ID NO: 4810 - DNA, 20 bp, Artificial Sequence
  Description of Artificial Sequence: Synthetic oligonucleotide
caccagctacggtgcgagct

SEQ ID NO: 4811 - DNA, 20 bp, Artificial Sequence
  Description of Artificial Sequence: Synthetic oligonucleotide
acaccagctacggtgcgagc

SEQ ID NO: 4812 - DNA, 20 bp, Artificial Sequence
  Description of Artificial Sequence: Synthetic oligonucleotide
gacaccagctacggtgcgag

SEQ ID NO: 4813 - DNA, 20 bp, Artificial Sequence
  Description of Artificial Sequence: Synthetic oligonucleotide
agacaccagctacggtgcga

SEQ ID NO: 4814 - DNA, 20 bp, Artificial Sequence
  Description of Artificial Sequence: Synthetic oligonucleotide
gagacaccagctacggtgcg

SEQ ID NO: 4815 - DNA, 20 bp, Artificial Sequence
  Description of Artificial Sequence: Synthetic oligonucleotide
agagacaccagctacggtgc

SEQ ID NO: 4816 - DNA, 20 bp, Artificial Sequence
  Description of Artificial Sequence: Synthetic oligonucleotide
tagagacaccagctacggtg

SEQ ID NO: 4817 - DNA, 20 bp, Artificial Sequence
  Description of Artificial Sequence: Synthetic oligonucleotide
atagagacaccagctacggt

SEQ ID NO: 4818 - DNA, 20 bp, Artificial Sequence
  Description of Artificial Sequence: Synthetic oligonucleotide
gatagagacaccagctacgg

SEQ ID NO: 4819 - DNA, 20 bp, Artificial Sequence
  Description of Artificial Sequence: Synthetic oligonucleotide
agatagagacaccagctacg

SEQ ID NO: 4820 - DNA, 20 bp, Artificial Sequence
  Description of Artificial Sequence: Synthetic oligonucleotide
cagatagagacaccagctac

SEQ ID NO: 4821 - DNA, 20 bp, Artificial Sequence
  Description of Artificial Sequence: Synthetic oligonucleotide
acagatagagacaccagcta

SEQ ID NO: 4822 - DNA, 20 bp, Artificial Sequence
  Description of Artificial Sequence: Synthetic oligonucleotide
tacagatagagacaccagct

SEQ ID NO: 4823 - DNA, 20 bp, Artificial Sequence
  Description of Artificial Sequence: Synthetic oligonucleotide
ctacagatagagacaccagc

SEQ ID NO: 4824 - DNA, 20 bp, Artificial Sequence
  Description of Artificial Sequence: Synthetic oligonucleotide
actacagatagagacaccag

SEQ ID NO: 4825 - DNA, 20 bp, Artificial Sequence
  Description of Artificial Sequence: Synthetic oligonucleotide
tactacagatagagacacca

SEQ ID NO: 4826 - DNA, 20 bp, Artificial Sequence
  Description of Artificial Sequence: Synthetic oligonucleotide
gtactacagatagagacacc

SEQ ID NO: 4827 - DNA, 20 bp, Artificial Sequence
  Description of Artificial Sequence: Synthetic oligonucleotide
agtactacagatagagacac

SEQ ID NO: 4828 - DNA, 20 bp, Artificial Sequence
  Description of Artificial Sequence: Synthetic oligonucleotide
tagtactacagatagagaca

SEQ ID NO: 4829 - DNA, 20 bp, Artificial Sequence
  Description of Artificial Sequence: Synthetic oligonucleotide
atagtactacagatagagac

SEQ ID NO: 4830 - DNA, 20 bp, Artificial Sequence
  Description of Artificial Sequence: Synthetic oligonucleotide
catagtactacagatagaga

SEQ ID NO: 4831 - DNA, 20 bp, Artificial Sequence
  Description of Artificial Sequence: Synthetic oligonucleotide
tcatagtactacagatagag

SEQ ID NO: 4832 - DNA, 20 bp, Artificial Sequence
  Description of Artificial Sequence: Synthetic oligonucleotide
gtcatagtactacagataga

SEQ ID NO: 4833 - DNA, 20 bp, Artificial Sequence
  Description of Artificial Sequence: Synthetic oligonucleotide
cctctagtggcggctattga

SEQ ID NO: 4834 - DNA, 20 bp, Artificial Sequence
  Description of Artificial Sequence: Synthetic oligonucleotide
tcctctagtggcggctattg

SEQ ID NO: 4835 - DNA, 20 bp, Artificial Sequence
  Description of Artificial Sequence: Synthetic oligonucleotide
ctcctctagtggcggctatt

SEQ ID NO: 4836 - DNA, 20 bp, Artificial Sequence
  Description of Artificial Sequence: Synthetic oligonucleotide
gctcctctagtggcggctat

SEQ ID NO: 4837 - DNA, 20 bp, Artificial Sequence
  Description of Artificial Sequence: Synthetic oligonucleotide
agctcctctagtggcggcta

SEQ ID NO: 4838 - DNA, 20 bp, Artificial Sequence
  Description of Artificial Sequence: Synthetic oligonucleotide
tagctcctctagtggcggct

SEQ ID NO: 4839 - DNA, 20 bp, Artificial Sequence
  Description of Artificial Sequence: Synthetic oligonucleotide
gtagctcctctagtggcggc

SEQ ID NO: 4840 - DNA, 20 bp, Artificial Sequence
  Description of Artificial Sequence: Synthetic oligonucleotide
agtagctcctctagtggcgg

SEQ ID NO: 4841 - DNA, 20 bp, Artificial Sequence
  Description of Artificial Sequence: Synthetic oligonucleotide
cagtagctcctctagtggcg

SEQ ID NO: 4842 - DNA, 20 bp, Artificial Sequence
  Description of Artificial Sequence: Synthetic oligonucleotide
acagtagctcctctagtggc

SEQ ID NO: 4843 - DNA, 20 bp, Artificial Sequence
  Description of Artificial Sequence: Synthetic oligonucleotide
agcatgttaggcatggctct

SEQ ID NO: 4844 - DNA, 20 bp, Artificial Sequence
  Description of Artificial Sequence: Synthetic oligonucleotide
aagcatgttaggcatggctc

SEQ ID NO: 4845 - DNA, 20 bp, Artificial Sequence
  Description of Artificial Sequence: Synthetic oligonucleotide
taagcatgttaggcatggct

SEQ ID NO: 4846 - DNA, 20 bp, Artificial Sequence
  Description of Artificial Sequence: Synthetic oligonucleotide
ctaagcatgttaggcatggc

SEQ ID NO: 4847 - DNA, 20 bp, Artificial Sequence
  Description of Artificial Sequence: Synthetic oligonucleotide
tgtttgcgagcaagaacaag

SEQ ID NO: 4848 - DNA, 20 bp, Artificial Sequence
  Description of Artificial Sequence: Synthetic oligonucleotide
atgtttgcgagcaagaacaa

SEQ ID NO: 4849 - DNA, 20 bp, Artificial Sequence
  Description of Artificial Sequence: Synthetic oligonucleotide
tatgtttgcgagcaagaaca

SEQ ID NO: 4850 - DNA, 20 bp, Artificial Sequence
  Description of Artificial Sequence: Synthetic oligonucleotide
ctattagcataagcagttgt

SEQ ID NO: 4851 - DNA, 20 bp, Artificial Sequence
  Description of Artificial Sequence: Synthetic oligonucleotide
actattagcataagcagttg

SEQ ID NO: 4852 - DNA, 20 bp, Artificial Sequence
  Description of Artificial Sequence: Synthetic oligonucleotide
cactattagcataagcagtt

SEQ ID NO: 4853 - DNA, 20 bp, Artificial Sequence
  Description of Artificial Sequence: Synthetic oligonucleotide
acactattagcataagcagt

SEQ ID NO: 4854 - DNA, 20 bp, Artificial Sequence
  Description of Artificial Sequence: Synthetic oligonucleotide
tttctatagagacactcata

SEQ ID NO: 4855 - DNA, 20 bp, Artificial Sequence
  Description of Artificial Sequence: Synthetic oligonucleotide
atttctatagagacactcat

SEQ ID NO: 4856 - DNA, 20 bp, Artificial Sequence
  Description of Artificial Sequence: Synthetic oligonucleotide
tatttctatagagacactca

SEQ ID NO: 4857 - DNA, 20 bp, Artificial Sequence
  Description of Artificial Sequence: Synthetic oligonucleotide
ctatttctatagagacactc

SEQ ID NO: 4858 - DNA, 20 bp, Artificial Sequence
  Description of Artificial Sequence: Synthetic oligonucleotide
gtaaggtcagtctcagtcca

SEQ ID NO: 4859 - DNA, 20 bp, Artificial Sequence
  Description of Artificial Sequence: Synthetic oligonucleotide
agtaaggtcagtctcagtcc

SEQ ID NO: 4860 - DNA, 20 bp, Artificial Sequence
  Description of Artificial Sequence: Synthetic oligonucleotide
tagtaaggtcagtctcagtc

SEQ ID NO: 4861 - DNA, 20 bp, Artificial Sequence
  Description of Artificial Sequence: Synthetic oligonucleotide
ttagtaaggtcagtctcagt

SEQ ID NO: 4862 - DNA, 20 bp, Artificial Sequence
  Description of Artificial Sequence: Synthetic oligonucleotide
tttagtaaggtcagtctcag

SEQ ID NO: 4863 - DNA, 20 bp, Artificial Sequence
  Description of Artificial Sequence: Synthetic oligonucleotide
ctttagtaaggtcagtctca

SEQ ID NO: 4864 - DNA, 20 bp, Artificial Sequence
  Description of Artificial Sequence: Synthetic oligonucleotide
cctttagtaaggtcagtctc

SEQ ID NO: 4865 - DNA, 20 bp, Artificial Sequence
  Description of Artificial Sequence: Synthetic oligonucleotide
tcctttagtaaggtcagtct

SEQ ID NO: 4866 - DNA, 20 bp, Artificial Sequence
  Description of Artificial Sequence: Synthetic oligonucleotide
gtcctttagtaaggtcagtc

SEQ ID NO: 4867 - DNA, 20 bp, Artificial Sequence
  Description of Artificial Sequence: Synthetic oligonucleotide
ggtcctttagtaaggtcagt

SEQ ID NO: 4868 - DNA, 20 bp, Artificial Sequence
  Description of Artificial Sequence: Synthetic oligonucleotide
aggtcctttagtaaggtcag

SEQ ID NO: 4869 - DNA, 20 bp, Artificial Sequence
  Description of Artificial Sequence: Synthetic oligonucleotide
gaggtcctttagtaaggtca

SEQ ID NO: 4870 - DNA, 20 bp, Artificial Sequence
  Description of Artificial Sequence: Synthetic oligonucleotide
tgaggtcctttagtaaggtc

SEQ ID NO: 4871 - DNA, 20 bp, Artificial Sequence
  Description of Artificial Sequence: Synthetic oligonucleotide
tgtttaactagcattgtatg

SEQ ID NO: 4872 - DNA, 20 bp, Artificial Sequence
  Description of Artificial Sequence: Synthetic oligonucleotide
ataagtgtaccatctgtttt

SEQ ID NO: 4873 - DNA, 20 bp, Artificial Sequence
  Description of Artificial Sequence: Synthetic oligonucleotide
cataagtgtaccatctgttt

SEQ ID NO: 4874 - DNA, 20 bp, Artificial Sequence
  Description of Artificial Sequence: Synthetic oligonucleotide
tcataagtgtaccatctgtt

SEQ ID NO: 4875 - DNA, 20 bp, Artificial Sequence
  Description of Artificial Sequence: Synthetic oligonucleotide
atcataagtgtaccatctgt

SEQ ID NO: 4876 - DNA, 20 bp, Artificial Sequence
  Description of Artificial Sequence: Synthetic oligonucleotide
aatcataagtgtaccatctg

SEQ ID NO: 4877 - DNA, 20 bp, Artificial Sequence
  Description of Artificial Sequence: Synthetic oligonucleotide
caatcataagtgtaccatct

SEQ ID NO: 4878 - DNA, 20 bp, Artificial Sequence
  Description of Artificial Sequence: Synthetic oligonucleotide
tcaatcataagtgtaccatc

SEQ ID NO: 4879 - DNA, 20 bp, Artificial Sequence
  Description of Artificial Sequence: Synthetic oligonucleotide
tcagcatactcctgattagg

SEQ ID NO: 4880 - DNA, 20 bp, Artificial Sequence
  Description of Artificial Sequence: Synthetic oligonucleotide
atcagcatactcctgattag

SEQ ID NO: 4881 - DNA, 20 bp, Artificial Sequence
  Description of Artificial Sequence: Synthetic oligonucleotide
catcagcatactcctgatta

SEQ ID NO: 4882 - DNA, 20 bp, Artificial Sequence
  Description of Artificial Sequence: Synthetic oligonucleotide
acatcagcatactcctgatt

SEQ ID NO: 4883 - DNA, 20 bp, Artificial Sequence
  Description of Artificial Sequence: Synthetic oligonucleotide
tcataaaactcaggttccca

SEQ ID NO: 4884 - DNA, 20 bp, Artificial Sequence
  Description of Artificial Sequence: Synthetic oligonucleotide
ttttcaaaggtgtactctcc

SEQ ID NO: 4885 - DNA, 20 bp, Artificial Sequence
  Description of Artificial Sequence: Synthetic oligonucleotide
tttttcaaaggtgtactctc

SEQ ID NO: 4886 - DNA, 20 bp, Artificial Sequence
  Description of Artificial Sequence: Synthetic oligonucleotide
ctttttcaaaggtgtactct

SEQ ID NO: 4887 - DNA, 20 bp, Artificial Sequence
  Description of Artificial Sequence: Synthetic oligonucleotide
cctttttcaaaggtgtactc

SEQ ID NO: 4888 - DNA, 20 bp, Artificial Sequence
  Description of Artificial Sequence: Synthetic oligonucleotide
acctttttcaaaggtgtact

SEQ ID NO: 4889 - DNA, 20 bp, Artificial Sequence
  Description of Artificial Sequence: Synthetic oligonucleotide
cacctttttcaaaggtgtac

SEQ ID NO: 4890 - DNA, 20 bp, Artificial Sequence
  Description of Artificial Sequence: Synthetic oligonucleotide
tcacctttttcaaaggtgta

SEQ ID NO: 4891 - DNA, 20 bp, Artificial Sequence
  Description of Artificial Sequence: Synthetic oligonucleotide
gtcacctttttcaaaggtgt

SEQ ID NO: 4892 - DNA, 20 bp, Artificial Sequence
  Description of Artificial Sequence: Synthetic oligonucleotide
agtcacctttttcaaaggtg

SEQ ID NO: 4893 - DNA, 20 bp, Artificial Sequence
  Description of Artificial Sequence: Synthetic oligonucleotide
tagtcacctttttcaaaggt

SEQ ID NO: 4894 - DNA, 20 bp, Artificial Sequence
  Description of Artificial Sequence: Synthetic oligonucleotide
atagtcacctttttcaaagg

SEQ ID NO: 4895 - DNA, 20 bp, Artificial Sequence
  Description of Artificial Sequence: Synthetic oligonucleotide
catagtcacctttttcaaag

SEQ ID NO: 4896 - DNA, 20 bp, Artificial Sequence
  Description of Artificial Sequence: Synthetic oligonucleotide
ccatagtcacctttttcaaa

SEQ ID NO: 4897 - DNA, 20 bp, Artificial Sequence
  Description of Artificial Sequence: Synthetic oligonucleotide
accatagtcacctttttcaa

SEQ ID NO: 4898 - DNA, 20 bp, Artificial Sequence
  Description of Artificial Sequence: Synthetic oligonucleotide
caccatagtcacctttttca

SEQ ID NO: 4899 - DNA, 20 bp, Artificial Sequence
  Description of Artificial Sequence: Synthetic oligonucleotide
tcaccatagtcacctttttc

SEQ ID NO: 4900 - DNA, 20 bp, Artificial Sequence
  Description of Artificial Sequence: Synthetic oligonucleotide
atcaccatagtcaccttttt

SEQ ID NO: 4901 - DNA, 20 bp, Artificial Sequence
  Description of Artificial Sequence: Synthetic oligonucleotide
catcaccatagtcacctttt

SEQ ID NO: 4902 - DNA, 20 bp, Artificial Sequence
  Description of Artificial Sequence: Synthetic oligonucleotide
gcatcaccatagtcaccttt

SEQ ID NO: 4903 - DNA, 20 bp, Artificial Sequence
  Description of Artificial Sequence: Synthetic oligonucleotide
agcatcaccatagtcacctt

SEQ ID NO: 4904 - DNA, 20 bp, Artificial Sequence
  Description of Artificial Sequence: Synthetic oligonucleotide
cagcatcaccatagtcacct

SEQ ID NO: 4905 - DNA, 20 bp, Artificial Sequence
  Description of Artificial Sequence: Synthetic oligonucleotide
acagcatcaccatagtcacc

SEQ ID NO: 4906 - DNA, 20 bp, Artificial Sequence
  Description of Artificial Sequence: Synthetic oligonucleotide
aacagcatcaccatagtcac

SEQ ID NO: 4907 - DNA, 20 bp, Artificial Sequence
  Description of Artificial Sequence: Synthetic oligonucleotide
caacagcatcaccatagtca

SEQ ID NO: 4908 - DNA, 20 bp, Artificial Sequence
  Description of Artificial Sequence: Synthetic oligonucleotide
acaacagcatcaccatagtc

SEQ ID NO: 4909 - DNA, 20 bp, Artificial Sequence
  Description of Artificial Sequence: Synthetic oligonucleotide
tagtgctcttgtggcactag

SEQ ID NO: 4910 - DNA, 20 bp, Artificial Sequence
  Description of Artificial Sequence: Synthetic oligonucleotide
atagtgctcttgtggcacta

SEQ ID NO: 4911 - DNA, 20 bp, Artificial Sequence
  Description of Artificial Sequence: Synthetic oligonucleotide
catagtgctcttgtggcact

SEQ ID NO: 4912 - DNA, 20 bp, Artificial Sequence
  Description of Artificial Sequence: Synthetic oligonucleotide
acatagtgctcttgtggcac

SEQ ID NO: 4913 - DNA, 20 bp, Artificial Sequence
  Description of Artificial Sequence: Synthetic oligonucleotide
ctagaaaactcatctgagat

SEQ ID NO: 4914 - DNA, 20 bp, Artificial Sequence
  Description of Artificial Sequence: Synthetic oligonucleotide
gctagaaaactcatctgaga

SEQ ID NO: 4915 - DNA, 20 bp, Artificial Sequence
  Description of Artificial Sequence: Synthetic oligonucleotide
tgctagaaaactcatctgag

SEQ ID NO: 4916 - DNA, 20 bp, Artificial Sequence
  Description of Artificial Sequence: Synthetic oligonucleotide
ttgctagaaaactcatctga

SEQ ID NO: 4917 - DNA, 20 bp, Artificial Sequence
  Description of Artificial Sequence: Synthetic oligonucleotide
attgctagaaaactcatctg

SEQ ID NO: 4918 - DNA, 20 bp, Artificial Sequence
  Description of Artificial Sequence: Synthetic oligonucleotide
cattgctagaaaactcatct

SEQ ID NO: 4919 - DNA, 20 bp, Artificial Sequence
  Description of Artificial Sequence: Synthetic oligonucleotide
acattgctagaaaactcatc

SEQ ID NO: 4920 - DNA, 20 bp, Artificial Sequence
  Description of Artificial Sequence: Synthetic oligonucleotide
aacattgctagaaaactcat

SEQ ID NO: 4921 - DNA, 20 bp, Artificial Sequence
  Description of Artificial Sequence: Synthetic oligonucleotide
caacattgctagaaaactca

SEQ ID NO: 4922 - DNA, 20 bp, Artificial Sequence
  Description of Artificial Sequence: Synthetic oligonucleotide
gcaacattgctagaaaactc

SEQ ID NO: 4923 - DNA, 20 bp, Artificial Sequence
  Description of Artificial Sequence: Synthetic oligonucleotide
tgcaacattgctagaaaact

SEQ ID NO: 4924 - DNA, 20 bp, Artificial Sequence
  Description of Artificial Sequence: Synthetic oligonucleotide
ttgcaacattgctagaaaac

SEQ ID NO: 4925 - DNA, 20 bp, Artificial Sequence
  Description of Artificial Sequence: Synthetic oligonucleotide
tttgcaacattgctagaaaa

SEQ ID NO: 4926 - DNA, 20 bp, Artificial Sequence
  Description of Artificial Sequence: Synthetic oligonucleotide
atttgcaacattgctagaaa

SEQ ID NO: 4927 - DNA, 20 bp, Artificial Sequence
  Description of Artificial Sequence: Synthetic oligonucleotide
aatttgcaacattgctagaa

SEQ ID NO: 4928 - DNA, 20 bp, Artificial Sequence
  Description of Artificial Sequence: Synthetic oligonucleotide
taatttgcaacattgctaga

SEQ ID NO: 4929 - DNA, 20 bp, Artificial Sequence
  Description of Artificial Sequence: Synthetic oligonucleotide
ttaccagtaccaggtggtcc

SEQ ID NO: 4930 - DNA, 20 bp, Artificial Sequence
  Description of Artificial Sequence: Synthetic oligonucleotide
cttaccagtaccaggtggtc

SEQ ID NO: 4931 - DNA, 20 bp, Artificial Sequence
  Description of Artificial Sequence: Synthetic oligonucleotide
tcttaccagtaccaggtggt

SEQ ID NO: 4932 - DNA, 20 bp, Artificial Sequence
  Description of Artificial Sequence: Synthetic oligonucleotide
ctcttaccagtaccaggtgg

SEQ ID NO: 4933 - DNA, 20 bp, Artificial Sequence
  Description of Artificial Sequence: Synthetic oligonucleotide
actcttaccagtaccaggtg

SEQ ID NO: 4934 - DNA, 20 bp, Artificial Sequence
  Description of Artificial Sequence: Synthetic oligonucleotide
gactcttaccagtaccaggt

SEQ ID NO: 4935 - DNA, 20 bp, Artificial Sequence
  Description of Artificial Sequence: Synthetic oligonucleotide
tgactcttaccagtaccagg

SEQ ID NO: 4936 - DNA, 20 bp, Artificial Sequence
  Description of Artificial Sequence: Synthetic oligonucleotide
atgactcttaccagtaccag

SEQ ID NO: 4937 - DNA, 20 bp, Artificial Sequence
  Description of Artificial Sequence: Synthetic oligonucleotide
aatgactcttaccagtacca

SEQ ID NO: 4938 - DNA, 20 bp, Artificial Sequence
  Description of Artificial Sequence: Synthetic oligonucleotide
aaatgactcttaccagtacc

SEQ ID NO: 4939 - DNA, 20 bp, Artificial Sequence
  Description of Artificial Sequence: Synthetic oligonucleotide
aaaatgactcttaccagtac

SEQ ID NO: 4940 - DNA, 20 bp, Artificial Sequence
  Description of Artificial Sequence: Synthetic oligonucleotide
caaaatgactcttaccagta

SEQ ID NO: 4941 - DNA, 20 bp, Artificial Sequence
  Description of Artificial Sequence: Synthetic oligonucleotide
gcaaaatgactcttaccagt

SEQ ID NO: 4942 - DNA, 20 bp, Artificial Sequence
  Description of Artificial Sequence: Synthetic oligonucleotide
gtatacactatgcgagcaga

SEQ ID NO: 4943 - DNA, 20 bp, Artificial Sequence
  Description of Artificial Sequence: Synthetic oligonucleotide
gttgaattcactttgaattt

SEQ ID NO: 4944 - DNA, 20 bp, Artificial Sequence
  Description of Artificial Sequence: Synthetic oligonucleotide
tgttgaattcactttgaatt

SEQ ID NO: 4945 - DNA, 20 bp, Artificial Sequence
  Description of Artificial Sequence: Synthetic oligonucleotide
aggaacatgtctggacctat

SEQ ID NO: 4946 - DNA, 20 bp, Artificial Sequence
  Description of Artificial Sequence: Synthetic oligonucleotide
acaatttcagcaggacaacg

SEQ ID NO: 4947 - DNA, 20 bp, Artificial Sequence
  Description of Artificial Sequence: Synthetic oligonucleotide
attgcagatgaaacatcatg

SEQ ID NO: 4948 - DNA, 20 bp, Artificial Sequence
  Description of Artificial Sequence: Synthetic oligonucleotide
acagcttttctccaagcagg

SEQ ID NO: 4949 - DNA, 20 bp, Artificial Sequence
  Description of Artificial Sequence: Synthetic oligonucleotide
gtgaatatgacatagtcata

SEQ ID NO: 4950 - DNA, 20 bp, Artificial Sequence
  Description of Artificial Sequence: Synthetic oligonucleotide
tctctatcagacattatgca

SEQ ID NO: 4951 - DNA, 20 bp, Artificial Sequence
  Description of Artificial Sequence: Synthetic oligonucleotide
aggtgtgtaggtgcctgtgt

SEQ ID NO: 4952 - DNA, 20 bp, Artificial Sequence
  Description of Artificial Sequence: Synthetic oligonucleotide
gaggtgtgtaggtgcctgtg

SEQ ID NO: 4953 - DNA, 20 bp, Artificial Sequence
  Description of Artificial Sequence: Synthetic oligonucleotide
tgaggtgtgtaggtgcctgt

SEQ ID NO: 4954 - DNA, 20 bp, Artificial Sequence
  Description of Artificial Sequence: Synthetic oligonucleotide
ctgaggtgtgtaggtgcctg

SEQ ID NO: 4955 - DNA, 20 bp, Artificial Sequence
  Description of Artificial Sequence: Synthetic oligonucleotide
cccatcatagagatgagtct

SEQ ID NO: 4956 - DNA, 20 bp, Artificial Sequence
  Description of Artificial Sequence: Synthetic oligonucleotide
acccatcatagagatgagtc

SEQ ID NO: 4957 - DNA, 20 bp, Artificial Sequence
  Description of Artificial Sequence: Synthetic oligonucleotide
aacccatcatagagatgagt

SEQ ID NO: 4958 - DNA, 20 bp, Artificial Sequence
  Description of Artificial Sequence: Synthetic oligonucleotide
aaacccatcatagagatgag

SEQ ID NO: 4959 - DNA, 20 bp, Artificial Sequence
  Description of Artificial Sequence: Synthetic oligonucleotide
gccacattttctaaactctg

SEQ ID NO: 4960 - DNA, 20 bp, Artificial Sequence
  Description of Artificial Sequence: Synthetic oligonucleotide
agccacattttctaaactct

SEQ ID NO: 4961 - DNA, 20 bp, Artificial Sequence
  Description of Artificial Sequence: Synthetic oligonucleotide
aagccacattttctaaactc

SEQ ID NO: 4962 - DNA, 20 bp, Artificial Sequence
  Description of Artificial Sequence: Synthetic oligonucleotide
cgcttagcccaaagctcaaa

SEQ ID NO: 4963 - DNA, 20 bp, Artificial Sequence
  Description of Artificial Sequence: Synthetic oligonucleotide
acacccaaattattgagtat

SEQ ID NO: 4964 - DNA, 20 bp, Artificial Sequence
  Description of Artificial Sequence: Synthetic oligonucleotide
ccaattaatgtgactccatt

SEQ ID NO: 4965 - DNA, 20 bp, Artificial Sequence
  Description of Artificial Sequence: Synthetic oligonucleotide
tccaattaatgtgactccat

SEQ ID NO: 4966 - DNA, 20 bp, Artificial Sequence
  Description of Artificial Sequence: Synthetic oligonucleotide
ctccaattaatgtgactcca

SEQ ID NO: 4967 - DNA, 20 bp, Artificial Sequence
  Description of Artificial Sequence: Synthetic oligonucleotide
tctccaattaatgtgactcc

SEQ ID NO: 4968 - DNA, 20 bp, Artificial Sequence
  Description of Artificial Sequence: Synthetic oligonucleotide
ttctccaattaatgtgactc

SEQ ID NO: 4969 - DNA, 20 bp, Artificial Sequence
  Description of Artificial Sequence: Synthetic oligonucleotide
tttgcgacattcatcattat

SEQ ID NO: 4970 - DNA, 20 bp, Artificial Sequence
  Description of Artificial Sequence: Synthetic oligonucleotide
actctgttgttttctctaat

SEQ ID NO: 4971 - DNA, 20 bp, Artificial Sequence
  Description of Artificial Sequence: Synthetic oligonucleotide
aactctgttgttttctctaa

SEQ ID NO: 4972 - DNA, 20 bp, Artificial Sequence
  Description of Artificial Sequence: Synthetic oligonucleotide
caactctgttgttttctcta

SEQ ID NO: 4973 - DNA, 20 bp, Artificial Sequence
  Description of Artificial Sequence: Synthetic oligonucleotide
acaactctgttgttttctct

SEQ ID NO: 4974 - DNA, 20 bp, Artificial Sequence
  Description of Artificial Sequence: Synthetic oligonucleotide
tggttctcatagagaacatt

SEQ ID NO: 4975 - DNA, 20 bp, Artificial Sequence
  Description of Artificial Sequence: Synthetic oligonucleotide
ttggttctcatagagaacat

SEQ ID NO: 4976 - DNA, 20 bp, Artificial Sequence
  Description of Artificial Sequence: Synthetic oligonucleotide
tttggttctcatagagaaca

SEQ ID NO: 4977 - DNA, 20 bp, Artificial Sequence
  Description of Artificial Sequence: Synthetic oligonucleotide
ttttggttctcatagagaac

SEQ ID NO: 4978 - DNA, 20 bp, Artificial Sequence
  Description of Artificial Sequence: Synthetic oligonucleotide
tttttggttctcatagagaa

SEQ ID NO: 4979 - DNA, 20 bp, Artificial Sequence
  Description of Artificial Sequence: Synthetic oligonucleotide
gagctaagttgtttaacaag

SEQ ID NO: 4980 - DNA, 20 bp, Artificial Sequence
  Description of Artificial Sequence: Synthetic oligonucleotide
gcagcaagattagcagaagc

SEQ ID NO: 4981 - DNA, 20 bp, Artificial Sequence
  Description of Artificial Sequence: Synthetic oligonucleotide
agcagcaagattagcagaag

SEQ ID NO: 4982 - DNA, 20 bp, Artificial Sequence
  Description of Artificial Sequence: Synthetic oligonucleotide
tagcagcaagattagcagaa

SEQ ID NO: 4983 - DNA, 20 bp, Artificial Sequence
  Description of Artificial Sequence: Synthetic oligonucleotide
gtagcagcaagattagcaga

SEQ ID NO: 4984 - DNA, 20 bp, Artificial Sequence
  Description of Artificial Sequence: Synthetic oligonucleotide
agtagcagcaagattagcag

SEQ ID NO: 4985 - DNA, 20 bp, Artificial Sequence
  Description of Artificial Sequence: Synthetic oligonucleotide
tagtagcagcaagattagca

SEQ ID NO: 4986 - DNA, 20 bp, Artificial Sequence
  Description of Artificial Sequence: Synthetic oligonucleotide
ttagtagcagcaagattagc

SEQ ID NO: 4987 - DNA, 20 bp, Artificial Sequence
  Description of Artificial Sequence: Synthetic oligonucleotide
tttagtagcagcaagattag

SEQ ID NO: 4988 - DNA, 20 bp, Artificial Sequence
  Description of Artificial Sequence: Synthetic oligonucleotide
ttttagtagcagcaagatta

SEQ ID NO: 4989 - DNA, 20 bp, Artificial Sequence
  Description of Artificial Sequence: Synthetic oligonucleotide
attttagtagcagcaagatt

SEQ ID NO: 4990 - DNA, 20 bp, Artificial Sequence
  Description of Artificial Sequence: Synthetic oligonucleotide
cattttagtagcagcaagat

SEQ ID NO: 4991 - DNA, 20 bp, Artificial Sequence
  Description of Artificial Sequence: Synthetic oligonucleotide
acattttagtagcagcaaga

SEQ ID NO: 4992 - DNA, 20 bp, Artificial Sequence
  Description of Artificial Sequence: Synthetic oligonucleotide
gacattttagtagcagcaag

SEQ ID NO: 4993 - DNA, 20 bp, Artificial Sequence
  Description of Artificial Sequence: Synthetic oligonucleotide
actctttttgattgtccaag

SEQ ID NO: 4994 - DNA, 20 bp, Artificial Sequence
  Description of Artificial Sequence: Synthetic oligonucleotide
aactctttttgattgtccaa

SEQ ID NO: 4995 - DNA, 20 bp, Artificial Sequence
  Description of Artificial Sequence: Synthetic oligonucleotide
caactctttttgattgtcca

SEQ ID NO: 4996 - DNA, 20 bp, Artificial Sequence
  Description of Artificial Sequence: Synthetic oligonucleotide
tcaactctttttgattgtcc

SEQ ID NO: 4997 - DNA, 20 bp, Artificial Sequence
  Description of Artificial Sequence: Synthetic oligonucleotide
acatctggtgatgtatgatt

SEQ ID NO: 4998 - DNA, 20 bp, Artificial Sequence
  Description of Artificial Sequence: Synthetic oligonucleotide
aacatctggtgatgtatgat

SEQ ID NO: 4999 - DNA, 20 bp, Artificial Sequence
  Description of Artificial Sequence: Synthetic oligonucleotide
caacatctggtgatgtatga

SEQ ID NO: 5000 - DNA, 20 bp, Artificial Sequence
  Description of Artificial Sequence: Synthetic oligonucleotide
tcaacatctggtgatgtatg

SEQ ID NO: 5001 - DNA, 20 bp, Artificial Sequence
  Description of Artificial Sequence: Synthetic oligonucleotide
atcaacatctggtgatgtat

SEQ ID NO: 5002 - DNA, 20 bp, Artificial Sequence
  Description of Artificial Sequence: Synthetic oligonucleotide
attgaggcggtcaatttctt

SEQ ID NO: 5003 - DNA, 20 bp, Artificial Sequence
  Description of Artificial Sequence: Synthetic oligonucleotide
cattgaggcggtcaatttct

SEQ ID NO: 5004 - DNA, 20 bp, Artificial Sequence
  Description of Artificial Sequence: Synthetic oligonucleotide
tcattgaggcggtcaatttc

SEQ ID NO: 5005 - DNA, 20 bp, Artificial Sequence
  Description of Artificial Sequence: Synthetic oligonucleotide
ctcattgaggcggtcaattt

SEQ ID NO: 5006 - DNA, 20 bp, Artificial Sequence
  Description of Artificial Sequence: Synthetic oligonucleotide
cctcattgaggcggtcaatt

SEQ ID NO: 5007 - DNA, 20 bp, Artificial Sequence
  Description of Artificial Sequence: Synthetic oligonucleotide
acctcattgaggcggtcaat

SEQ ID NO: 5008 - DNA, 20 bp, Artificial Sequence
  Description of Artificial Sequence: Synthetic oligonucleotide
tatgtgtaatgtaatttgac

SEQ ID NO: 5009 - DNA, 20 bp, Artificial Sequence
  Description of Artificial Sequence: Synthetic oligonucleotide
ttatgtgtaatgtaatttga

SEQ ID NO: 5010 - DNA, 20 bp, Artificial Sequence
  Description of Artificial Sequence: Synthetic oligonucleotide
tttatgtgtaatgtaatttg

SEQ ID NO: 5011 - DNA, 20 bp, Artificial Sequence
  Description of Artificial Sequence: Synthetic oligonucleotide
gtttatgtgtaatgtaattt

SEQ ID NO: 5012 - DNA, 20 bp, Artificial Sequence
  Description of Artificial Sequence: Synthetic oligonucleotide
cgtttatgtgtaatgtaatt

SEQ ID NO: 5013 - DNA, 20 bp, Artificial Sequence
  Description of Artificial Sequence: Synthetic oligonucleotide
gaaagggagtgaggcttgta

SEQ ID NO: 5014 - DNA, 20 bp, Artificial Sequence
  Description of Artificial Sequence: Synthetic oligonucleotide
cgaaagggagtgaggcttgt

SEQ ID NO: 5015 - DNA, 20 bp, Artificial Sequence
  Description of Artificial Sequence: Synthetic oligonucleotide
ccgaaagggagtgaggcttg

SEQ ID NO: 5016 - DNA, 20 bp, Artificial Sequence
  Description of Artificial Sequence: Synthetic oligonucleotide
tccgaaagggagtgaggctt

SEQ ID NO: 5017 - DNA, 20 bp, Artificial Sequence
  Description of Artificial Sequence: Synthetic oligonucleotide
atccgaaagggagtgaggct

SEQ ID NO: 5018 - DNA, 20 bp, Artificial Sequence
  Description of Artificial Sequence: Synthetic oligonucleotide
catccgaaagggagtgaggc

SEQ ID NO: 5019 - DNA, 20 bp, Artificial Sequence
  Description of Artificial Sequence: Synthetic oligonucleotide
ccatccgaaagggagtgagg

SEQ ID NO: 5020 - DNA, 20 bp, Artificial Sequence
  Description of Artificial Sequence: Synthetic oligonucleotide
gccatccgaaagggagtgag

SEQ ID NO: 5021 - DNA, 20 bp, Artificial Sequence
  Description of Artificial Sequence: Synthetic oligonucleotide
agccatccgaaagggagtga

SEQ ID NO: 5022 - DNA, 20 bp, Artificial Sequence
  Description of Artificial Sequence: Synthetic oligonucleotide
aagccatccgaaagggagtg

SEQ ID NO: 5023 - DNA, 20 bp, Artificial Sequence
  Description of Artificial Sequence: Synthetic oligonucleotide
acgctagtagtcgtcgtcgg

SEQ ID NO: 5024 - DNA, 20 bp, Artificial Sequence
  Description of Artificial Sequence: Synthetic oligonucleotide
cacgctagtagtcgtcgtcg

SEQ ID NO: 5025 - DNA, 20 bp, Artificial Sequence
  Description of Artificial Sequence: Synthetic oligonucleotide
gcacgctagtagtcgtcgtc

SEQ ID NO: 5026 - DNA, 20 bp, Artificial Sequence
  Description of Artificial Sequence: Synthetic oligonucleotide
ggcacgctagtagtcgtcgt

SEQ ID NO: 5027 - DNA, 20 bp, Artificial Sequence
  Description of Artificial Sequence: Synthetic oligonucleotide
aggcacgctagtagtcgtcg

SEQ ID NO: 5028 - DNA, 20 bp, Artificial Sequence
  Description of Artificial Sequence: Synthetic oligonucleotide
aaggcacgctagtagtcgtc

SEQ ID NO: 5029 - DNA, 20 bp, Artificial Sequence
  Description of Artificial Sequence: Synthetic oligonucleotide
aaaggcacgctagtagtcgt

SEQ ID NO: 5030 - DNA, 20 bp, Artificial Sequence
  Description of Artificial Sequence: Synthetic oligonucleotide
caaaggcacgctagtagtcg

SEQ ID NO: 5031 - DNA, 20 bp, Artificial Sequence
  Description of Artificial Sequence: Synthetic oligonucleotide
acaaaggcacgctagtagtc

SEQ ID NO: 5032 - DNA, 20 bp, Artificial Sequence
  Description of Artificial Sequence: Synthetic oligonucleotide
tacaaaggcacgctagtagt

SEQ ID NO: 5033 - DNA, 20 bp, Artificial Sequence
  Description of Artificial Sequence: Synthetic oligonucleotide
ttacaaaggcacgctagtag

SEQ ID NO: 5034 - DNA, 20 bp, Artificial Sequence
  Description of Artificial Sequence: Synthetic oligonucleotide
cttacaaaggcacgctagta

SEQ ID NO: 5035 - DNA, 20 bp, Artificial Sequence
  Description of Artificial Sequence: Synthetic oligonucleotide
gcttacaaaggcacgctagt

SEQ ID NO: 5036 - DNA, 20 bp, Artificial Sequence
  Description of Artificial Sequence: Synthetic oligonucleotide
tgcttacaaaggcacgctag

SEQ ID NO: 5037 - DNA, 20 bp, Artificial Sequence
  Description of Artificial Sequence: Synthetic oligonucleotide
gtgcttacaaaggcacgcta

SEQ ID NO: 5038 - DNA, 20 bp, Artificial Sequence
  Description of Artificial Sequence: Synthetic oligonucleotide
tgtgcttacaaaggcacgct

SEQ ID NO: 5039 - DNA, 20 bp, Artificial Sequence
  Description of Artificial Sequence: Synthetic oligonucleotide
ttgtgcttacaaaggcacgc

SEQ ID NO: 5040 - DNA, 20 bp, Artificial Sequence
  Description of Artificial Sequence: Synthetic oligonucleotide
cttgtgcttacaaaggcacg

SEQ ID NO: 5041 - DNA, 20 bp, Artificial Sequence
  Description of Artificial Sequence: Synthetic oligonucleotide
agtacataagttcgtactca

SEQ ID NO: 5042 - DNA, 20 bp, Artificial Sequence
  Description of Artificial Sequence: Synthetic oligonucleotide
gagtacataagttcgtactc

SEQ ID NO: 5043 - DNA, 20 bp, Artificial Sequence
  Description of Artificial Sequence: Synthetic oligonucleotide
tgagtacataagttcgtact

SEQ ID NO: 5044 - DNA, 20 bp, Artificial Sequence
  Description of Artificial Sequence: Synthetic oligonucleotide
atgagtacataagttcgtac

SEQ ID NO: 5045 - DNA, 20 bp, Artificial Sequence
  Description of Artificial Sequence: Synthetic oligonucleotide
aatgagtacataagttcgta

SEQ ID NO: 5046 - DNA, 20 bp, Artificial Sequence
  Description of Artificial Sequence: Synthetic oligonucleotide
gaatgagtacataagttcgt

SEQ ID NO: 5047 - DNA, 20 bp, Artificial Sequence
  Description of Artificial Sequence: Synthetic oligonucleotide
cgaatgagtacataagttcg

SEQ ID NO: 5048 - DNA, 20 bp, Artificial Sequence
  Description of Artificial Sequence: Synthetic oligonucleotide
acgaatgagtacataagttc

SEQ ID NO: 5049 - DNA, 20 bp, Artificial Sequence
  Description of Artificial Sequence: Synthetic oligonucleotide
aacgaatgagtacataagtt

SEQ ID NO: 5050 - DNA, 20 bp, Artificial Sequence
  Description of Artificial Sequence: Synthetic oligonucleotide
aaacgaatgagtacataagt

SEQ ID NO: 5051 - DNA, 20 bp, Artificial Sequence
  Description of Artificial Sequence: Synthetic oligonucleotide
gaaacgaatgagtacataag

SEQ ID NO: 5052 - DNA, 20 bp, Artificial Sequence
  Description of Artificial Sequence: Synthetic oligonucleotide
cgaaacgaatgagtacataa

SEQ ID NO: 5053 - DNA, 20 bp, Artificial Sequence
  Description of Artificial Sequence: Synthetic oligonucleotide
ccgaaacgaatgagtacata

SEQ ID NO: 5054 - DNA, 20 bp, Artificial Sequence
  Description of Artificial Sequence: Synthetic oligonucleotide
tccgaaacgaatgagtacat

SEQ ID NO: 5055 - DNA, 20 bp, Artificial Sequence
  Description of Artificial Sequence: Synthetic oligonucleotide
ttccgaaacgaatgagtaca

SEQ ID NO: 5056 - DNA, 20 bp, Artificial Sequence
  Description of Artificial Sequence: Synthetic oligonucleotide
cttccgaaacgaatgagtac

SEQ ID NO: 5057 - DNA, 20 bp, Artificial Sequence
  Description of Artificial Sequence: Synthetic oligonucleotide
tcttccgaaacgaatgagta

SEQ ID NO: 5058 - DNA, 20 bp, Artificial Sequence
  Description of Artificial Sequence: Synthetic oligonucleotide
ttaactattaacgtacctgt

SEQ ID NO: 5059 - DNA, 20 bp, Artificial Sequence
  Description of Artificial Sequence: Synthetic oligonucleotide
attaactattaacgtacctg

SEQ ID NO: 5060 - DNA, 20 bp, Artificial Sequence
  Description of Artificial Sequence: Synthetic oligonucleotide
tattaactattaacgtacct

SEQ ID NO: 5061 - DNA, 20 bp, Artificial Sequence
  Description of Artificial Sequence: Synthetic oligonucleotide
ctattaactattaacgtacc

SEQ ID NO: 5062 - DNA, 20 bp, Artificial Sequence
  Description of Artificial Sequence: Synthetic oligonucleotide
gctattaactattaacgtac

SEQ ID NO: 5063 - DNA, 20 bp, Artificial Sequence
  Description of Artificial Sequence: Synthetic oligonucleotide
cgctattaactattaacgta

SEQ ID NO: 5064 - DNA, 20 bp, Artificial Sequence
  Description of Artificial Sequence: Synthetic oligonucleotide
acgctattaactattaacgt

SEQ ID NO: 5065 - DNA, 20 bp, Artificial Sequence
  Description of Artificial Sequence: Synthetic oligonucleotide
tacgctattaactattaacg

SEQ ID NO: 5066 - DNA, 20 bp, Artificial Sequence
  Description of Artificial Sequence: Synthetic oligonucleotide
gtacgctattaactattaac

SEQ ID NO: 5067 - DNA, 20 bp, Artificial Sequence
  Description of Artificial Sequence: Synthetic oligonucleotide
agtacgctattaactattaa

SEQ ID NO: 5068 - DNA, 20 bp, Artificial Sequence
  Description of Artificial Sequence: Synthetic oligonucleotide
aagtacgctattaactatta

SEQ ID NO: 5069 - DNA, 20 bp, Artificial Sequence
  Description of Artificial Sequence: Synthetic oligonucleotide
gaagtacgctattaactatt

SEQ ID NO: 5070 - DNA, 20 bp, Artificial Sequence
  Description of Artificial Sequence: Synthetic oligonucleotide
agaagtacgctattaactat

SEQ ID NO: 5071 - DNA, 20 bp, Artificial Sequence
  Description of Artificial Sequence: Synthetic oligonucleotide
aagaagtacgctattaacta

SEQ ID NO: 5072 - DNA, 20 bp, Artificial Sequence
  Description of Artificial Sequence: Synthetic oligonucleotide
aaagaagtacgctattaact

SEQ ID NO: 5073 - DNA, 20 bp, Artificial Sequence
  Description of Artificial Sequence: Synthetic oligonucleotide
aaaagaagtacgctattaac

SEQ ID NO: 5074 - DNA, 20 bp, Artificial Sequence
  Description of Artificial Sequence: Synthetic oligonucleotide
aaaaagaagtacgctattaa

SEQ ID NO: 5075 - DNA, 20 bp, Artificial Sequence
  Description of Artificial Sequence: Synthetic oligonucleotide
gaaaaagaagtacgctatta

SEQ ID NO: 5076 - DNA, 20 bp, Artificial Sequence
  Description of Artificial Sequence: Synthetic oligonucleotide
agaaaaagaagtacgctatt

SEQ ID NO: 5077 - DNA, 20 bp, Artificial Sequence
  Description of Artificial Sequence: Synthetic oligonucleotide
aagaaaaagaagtacgctat

SEQ ID NO: 5078 - DNA, 20 bp, Artificial Sequence
  Description of Artificial Sequence: Synthetic oligonucleotide
caagaaaaagaagtacgcta

SEQ ID NO: 5079 - DNA, 20 bp, Artificial Sequence
  Description of Artificial Sequence: Synthetic oligonucleotide
gcaagaaaaagaagtacgct

SEQ ID NO: 5080 - DNA, 20 bp, Artificial Sequence
  Description of Artificial Sequence: Synthetic oligonucleotide
agcaagaaaaagaagtacgc

SEQ ID NO: 5081 - DNA, 20 bp, Artificial Sequence
  Description of Artificial Sequence: Synthetic oligonucleotide
aagcaagaaaaagaagtacg

SEQ ID NO: 5082 - DNA, 20 bp, Artificial Sequence
  Description of Artificial Sequence: Synthetic oligonucleotide
aaagcaagaaaaagaagtac

SEQ ID NO: 5083 - DNA, 20 bp, Artificial Sequence
  Description of Artificial Sequence: Synthetic oligonucleotide
gaaagcaagaaaaagaagta

SEQ ID NO: 5084 - DNA, 20 bp, Artificial Sequence
  Description of Artificial Sequence: Synthetic oligonucleotide
cgaaagcaagaaaaagaagt

SEQ ID NO: 5085 - DNA, 20 bp, Artificial Sequence
  Description of Artificial Sequence: Synthetic oligonucleotide
acgaaagcaagaaaaagaag

SEQ ID NO: 5086 - DNA, 20 bp, Artificial Sequence
  Description of Artificial Sequence: Synthetic oligonucleotide
cacgaaagcaagaaaaagaa

SEQ ID NO: 5087 - DNA, 20 bp, Artificial Sequence
  Description of Artificial Sequence: Synthetic oligonucleotide
ccacgaaagcaagaaaaaga

SEQ ID NO: 5088 - DNA, 20 bp, Artificial Sequence
  Description of Artificial Sequence: Synthetic oligonucleotide
accacgaaagcaagaaaaag

SEQ ID NO: 5089 - DNA, 20 bp, Artificial Sequence
  Description of Artificial Sequence: Synthetic oligonucleotide
taccacgaaagcaagaaaaa

SEQ ID NO: 5090 - DNA, 20 bp, Artificial Sequence
  Description of Artificial Sequence: Synthetic oligonucleotide
ataccacgaaagcaagaaaa

SEQ ID NO: 5091 - DNA, 20 bp, Artificial Sequence
  Description of Artificial Sequence: Synthetic oligonucleotide
aataccacgaaagcaagaaa

SEQ ID NO: 5092 - DNA, 20 bp, Artificial Sequence
  Description of Artificial Sequence: Synthetic oligonucleotide
gaataccacgaaagcaagaa

SEQ ID NO: 5093 - DNA, 20 bp, Artificial Sequence
  Description of Artificial Sequence: Synthetic oligonucleotide
agaataccacgaaagcaaga

SEQ ID NO: 5094 - DNA, 20 bp, Artificial Sequence
  Description of Artificial Sequence: Synthetic oligonucleotide
aagaataccacgaaagcaag

SEQ ID NO: 5095 - DNA, 20 bp, Artificial Sequence
  Description of Artificial Sequence: Synthetic oligonucleotide
caagaataccacgaaagcaa

SEQ ID NO: 5096 - DNA, 20 bp, Artificial Sequence
  Description of Artificial Sequence: Synthetic oligonucleotide
gcaagaataccacgaaagca

SEQ ID NO: 5097 - DNA, 20 bp, Artificial Sequence
  Description of Artificial Sequence: Synthetic oligonucleotide
agcaagaataccacgaaagc

SEQ ID NO: 5098 - DNA, 20 bp, Artificial Sequence
  Description of Artificial Sequence: Synthetic oligonucleotide
tagcaagaataccacgaaag

SEQ ID NO: 5099 - DNA, 20 bp, Artificial Sequence
  Description of Artificial Sequence: Synthetic oligonucleotide
ctagcaagaataccacgaaa

SEQ ID NO: 5100 - DNA, 20 bp, Artificial Sequence
  Description of Artificial Sequence: Synthetic oligonucleotide
actagcaagaataccacgaa

SEQ ID NO: 5101 - DNA, 20 bp, Artificial Sequence
  Description of Artificial Sequence: Synthetic oligonucleotide
gcagtaaggatggctagtgt

SEQ ID NO: 5102 - DNA, 20 bp, Artificial Sequence
  Description of Artificial Sequence: Synthetic oligonucleotide
cgcagtaaggatggctagtg

SEQ ID NO: 5103 - DNA, 20 bp, Artificial Sequence
  Description of Artificial Sequence: Synthetic oligonucleotide
gcgcagtaaggatggctagt

SEQ ID NO: 5104 - DNA, 20 bp, Artificial Sequence
  Description of Artificial Sequence: Synthetic oligonucleotide
agcgcagtaaggatggctag

SEQ ID NO: 5105 - DNA, 20 bp, Artificial Sequence
  Description of Artificial Sequence: Synthetic oligonucleotide
aagcgcagtaaggatggcta

SEQ ID NO: 5106 - DNA, 20 bp, Artificial Sequence
  Description of Artificial Sequence: Synthetic oligonucleotide
gaagcgcagtaaggatggct

SEQ ID NO: 5107 - DNA, 20 bp, Artificial Sequence
  Description of Artificial Sequence: Synthetic oligonucleotide
cgaagcgcagtaaggatggc

SEQ ID NO: 5108 - DNA, 20 bp, Artificial Sequence
  Description of Artificial Sequence: Synthetic oligonucleotide
tcgaagcgcagtaaggatgg

SEQ ID NO: 5109 - DNA, 20 bp, Artificial Sequence
  Description of Artificial Sequence: Synthetic oligonucleotide
atcgaagcgcagtaaggatg

SEQ ID NO: 5110 - DNA, 20 bp, Artificial Sequence
  Description of Artificial Sequence: Synthetic oligonucleotide
aatcgaagcgcagtaaggat

SEQ ID NO: 5111 - DNA, 20 bp, Artificial Sequence
  Description of Artificial Sequence: Synthetic oligonucleotide
caatcgaagcgcagtaagga

SEQ ID NO: 5112 - DNA, 20 bp, Artificial Sequence
  Description of Artificial Sequence: Synthetic oligonucleotide
acaatcgaagcgcagtaagg

SEQ ID NO: 5113 - DNA, 20 bp, Artificial Sequence
  Description of Artificial Sequence: Synthetic oligonucleotide
cacaatcgaagcgcagtaag

SEQ ID NO: 5114 - DNA, 20 bp, Artificial Sequence
  Description of Artificial Sequence: Synthetic oligonucleotide
acacaatcgaagcgcagtaa

SEQ ID NO: 5115 - DNA, 20 bp, Artificial Sequence
  Description of Artificial Sequence: Synthetic oligonucleotide
cacacaatcgaagcgcagta

SEQ ID NO: 5116 - DNA, 20 bp, Artificial Sequence
  Description of Artificial Sequence: Synthetic oligonucleotide
gcacacaatcgaagcgcagt

SEQ ID NO: 5117 - DNA, 20 bp, Artificial Sequence
  Description of Artificial Sequence: Synthetic oligonucleotide
cgcacacaatcgaagcgcag

SEQ ID NO: 5118 - DNA, 20 bp, Artificial Sequence
  Description of Artificial Sequence: Synthetic oligonucleotide
acgcacacaatcgaagcgca

SEQ ID NO: 5119 - DNA, 20 bp, Artificial Sequence
  Description of Artificial Sequence: Synthetic oligonucleotide
tacgcacacaatcgaagcgc

SEQ ID NO: 5120 - DNA, 20 bp, Artificial Sequence
  Description of Artificial Sequence: Synthetic oligonucleotide
gtacgcacacaatcgaagcg

SEQ ID NO: 5121 - DNA, 20 bp, Artificial Sequence
  Description of Artificial Sequence: Synthetic oligonucleotide
agtacgcacacaatcgaagc

SEQ ID NO: 5122 - DNA, 20 bp, Artificial Sequence
  Description of Artificial Sequence: Synthetic oligonucleotide
cagtacgcacacaatcgaag

SEQ ID NO: 5123 - DNA, 20 bp, Artificial Sequence
  Description of Artificial Sequence: Synthetic oligonucleotide
gcagtacgcacacaatcgaa

SEQ ID NO: 5124 - DNA, 20 bp, Artificial Sequence
  Description of Artificial Sequence: Synthetic oligonucleotide
agcagtacgcacacaatcga

SEQ ID NO: 5125 - DNA, 20 bp, Artificial Sequence
  Description of Artificial Sequence: Synthetic oligonucleotide
cagcagtacgcacacaatcg

SEQ ID NO: 5126 - DNA, 20 bp, Artificial Sequence
  Description of Artificial Sequence: Synthetic oligonucleotide
gcagcagtacgcacacaatc

SEQ ID NO: 5127 - DNA, 20 bp, Artificial Sequence
  Description of Artificial Sequence: Synthetic oligonucleotide
tgcagcagtacgcacacaat

SEQ ID NO: 5128 - DNA, 20 bp, Artificial Sequence
  Description of Artificial Sequence: Synthetic oligonucleotide
ttgcagcagtacgcacacaa

SEQ ID NO: 5129 - DNA, 20 bp, Artificial Sequence
  Description of Artificial Sequence: Synthetic oligonucleotide
attgcagcagtacgcacaca

SEQ ID NO: 5130 - DNA, 20 bp, Artificial Sequence
  Description of Artificial Sequence: Synthetic oligonucleotide
tattgcagcagtacgcacac

SEQ ID NO: 5131 - DNA, 20 bp, Artificial Sequence
  Description of Artificial Sequence: Synthetic oligonucleotide
atattgcagcagtacgcaca

SEQ ID NO: 5132 - DNA, 20 bp, Artificial Sequence
  Description of Artificial Sequence: Synthetic oligonucleotide
aatattgcagcagtacgcac

SEQ ID NO: 5133 - DNA, 20 bp, Artificial Sequence
  Description of Artificial Sequence: Synthetic oligonucleotide
caatattgcagcagtacgca

SEQ ID NO: 5134 - DNA, 20 bp, Artificial Sequence
  Description of Artificial Sequence: Synthetic oligonucleotide
acaatattgcagcagtacgc

SEQ ID NO: 5135 - DNA, 20 bp, Artificial Sequence
  Description of Artificial Sequence: Synthetic oligonucleotide
aacaatattgcagcagtacg

SEQ ID NO: 5136 - DNA, 20 bp, Artificial Sequence
  Description of Artificial Sequence: Synthetic oligonucleotide
taacaatattgcagcagtac

SEQ ID NO: 5137 - DNA, 20 bp, Artificial Sequence
  Description of Artificial Sequence: Synthetic oligonucleotide
ttaacaatattgcagcagta

SEQ ID NO: 5138 - DNA, 20 bp, Artificial Sequence
  Description of Artificial Sequence: Synthetic oligonucleotide
gttaacaatattgcagcagt

SEQ ID NO: 5139 - DNA, 20 bp, Artificial Sequence
  Description of Artificial Sequence: Synthetic oligonucleotide
cgttaacaatattgcagcag

SEQ ID NO: 5140 - DNA, 20 bp, Artificial Sequence
  Description of Artificial Sequence: Synthetic oligonucleotide
acgttaacaatattgcagca

SEQ ID NO: 5141 - DNA, 20 bp, Artificial Sequence
  Description of Artificial Sequence: Synthetic oligonucleotide
cacgttaacaatattgcagc

SEQ ID NO: 5142 - DNA, 20 bp, Artificial Sequence
  Description of Artificial Sequence: Synthetic oligonucleotide
tcacgttaacaatattgcag

SEQ ID NO: 5143 - DNA, 20 bp, Artificial Sequence
  Description of Artificial Sequence: Synthetic oligonucleotide
ctcacgttaacaatattgca

SEQ ID NO: 5144 - DNA, 20 bp, Artificial Sequence
  Description of Artificial Sequence: Synthetic oligonucleotide
actcacgttaacaatattgc

SEQ ID NO: 5145 - DNA, 20 bp, Artificial Sequence
  Description of Artificial Sequence: Synthetic oligonucleotide
gaccagaagatcaggaactc

SEQ ID NO: 5146 - DNA, 20 bp, Artificial Sequence
  Description of Artificial Sequence: Synthetic oligonucleotide
agaccagaagatcaggaact

SEQ ID NO: 5147 - DNA, 20 bp, Artificial Sequence
  Description of Artificial Sequence: Synthetic oligonucleotide
tagaccagaagatcaggaac

SEQ ID NO: 5148 - DNA, 20 bp, Artificial Sequence
  Description of Artificial Sequence: Synthetic oligonucleotide
ttagaccagaagatcaggaa

SEQ ID NO: 5149 - DNA, 20 bp, Artificial Sequence
  Description of Artificial Sequence: Synthetic oligonucleotide
tttagaccagaagatcagga

SEQ ID NO: 5150 - DNA, 20 bp, Artificial Sequence
  Description of Artificial Sequence: Synthetic oligonucleotide
gtttagaccagaagatcagg

SEQ ID NO: 5151 - DNA, 20 bp, Artificial Sequence
  Description of Artificial Sequence: Synthetic oligonucleotide
cgtttagaccagaagatcag

SEQ ID NO: 5152 - DNA, 20 bp, Artificial Sequence
  Description of Artificial Sequence: Synthetic oligonucleotide
tcgtttagaccagaagatca

SEQ ID NO: 5153 - DNA, 20 bp, Artificial Sequence
  Description of Artificial Sequence: Synthetic oligonucleotide
ttcgtttagaccagaagatc

SEQ ID NO: 5154 - DNA, 20 bp, Artificial Sequence
  Description of Artificial Sequence: Synthetic oligonucleotide
gttcgtttagaccagaagat

SEQ ID NO: 5155 - DNA, 20 bp, Artificial Sequence
  Description of Artificial Sequence: Synthetic oligonucleotide
agttcgtttagaccagaaga

SEQ ID NO: 5156 - DNA, 20 bp, Artificial Sequence
  Description of Artificial Sequence: Synthetic oligonucleotide
tagttcgtttagaccagaag

SEQ ID NO: 5157 - DNA, 20 bp, Artificial Sequence
  Description of Artificial Sequence: Synthetic oligonucleotide
ttagttcgtttagaccagaa

SEQ ID NO: 5158 - DNA, 20 bp, Artificial Sequence
  Description of Artificial Sequence: Synthetic oligonucleotide
attactaggttccattgttc

SEQ ID NO: 5159 - DNA, 20 bp, Artificial Sequence
  Description of Artificial Sequence: Synthetic oligonucleotide
tattactaggttccattgtt

SEQ ID NO: 5160 - DNA, 20 bp, Artificial Sequence
  Description of Artificial Sequence: Synthetic oligonucleotide
ctattactaggttccattgt

SEQ ID NO: 5161 - DNA, 20 bp, Artificial Sequence
  Description of Artificial Sequence: Synthetic oligonucleotide
cctattactaggttccattg

SEQ ID NO: 5162 - DNA, 20 bp, Artificial Sequence
  Description of Artificial Sequence: Synthetic oligonucleotide
acctattactaggttccatt

SEQ ID NO: 5163 - DNA, 20 bp, Artificial Sequence
  Description of Artificial Sequence: Synthetic oligonucleotide
aacctattactaggttccat

SEQ ID NO: 5164 - DNA, 20 bp, Artificial Sequence
  Description of Artificial Sequence: Synthetic oligonucleotide
aaacctattactaggttcca

SEQ ID NO: 5165 - DNA, 20 bp, Artificial Sequence
  Description of Artificial Sequence: Synthetic oligonucleotide
gaaacctattactaggttcc

SEQ ID NO: 5166 - DNA, 20 bp, Artificial Sequence
  Description of Artificial Sequence: Synthetic oligonucleotide
gaaagcgttcgtgatgtagc

SEQ ID NO: 5167 - DNA, 20 bp, Artificial Sequence
  Description of Artificial Sequence: Synthetic oligonucleotide
agaaagcgttcgtgatgtag

SEQ ID NO: 5168 - DNA, 20 bp, Artificial Sequence
  Description of Artificial Sequence: Synthetic oligonucleotide
aagaaagcgttcgtgatgta

SEQ ID NO: 5169 - DNA, 20 bp, Artificial Sequence
  Description of Artificial Sequence: Synthetic oligonucleotide
taagaaagcgttcgtgatgt

SEQ ID NO: 5170 - DNA, 20 bp, Artificial Sequence
  Description of Artificial Sequence: Synthetic oligonucleotide
ataagaaagcgttcgtgatg

SEQ ID NO: 5171 - DNA, 20 bp, Artificial Sequence
  Description of Artificial Sequence: Synthetic oligonucleotide
aataagaaagcgttcgtgat

SEQ ID NO: 5172 - DNA, 20 bp, Artificial Sequence
  Description of Artificial Sequence: Synthetic oligonucleotide
taataagaaagcgttcgtga

SEQ ID NO: 5173 - DNA, 20 bp, Artificial Sequence
  Description of Artificial Sequence: Synthetic oligonucleotide
gtaataagaaagcgttcgtg

SEQ ID NO: 5174 - DNA, 20 bp, Artificial Sequence
  Description of Artificial Sequence: Synthetic oligonucleotide
tgtaataagaaagcgttcgt

SEQ ID NO: 5175 - DNA, 20 bp, Artificial Sequence
  Description of Artificial Sequence: Synthetic oligonucleotide
ttgtaataagaaagcgttcg

SEQ ID NO: 5176 - DNA, 20 bp, Artificial Sequence
  Description of Artificial Sequence: Synthetic oligonucleotide
tttgtaataagaaagcgttc

SEQ ID NO: 5177 - DNA, 20 bp, Artificial Sequence
  Description of Artificial Sequence: Synthetic oligonucleotide
atttgtaataagaaagcgtt

SEQ ID NO: 5178 - DNA, 20 bp, Artificial Sequence
  Description of Artificial Sequence: Synthetic oligonucleotide
aatttgtaataagaaagcgt

SEQ ID NO: 5179 - DNA, 20 bp, Artificial Sequence
  Description of Artificial Sequence: Synthetic oligonucleotide
tctgttgtcacttactgtac

SEQ ID NO: 5180 - DNA, 20 bp, Artificial Sequence
  Description of Artificial Sequence: Synthetic oligonucleotide
atctgttgtcacttactgta

SEQ ID NO: 5181 - DNA, 20 bp, Artificial Sequence
  Description of Artificial Sequence: Synthetic oligonucleotide
catctgttgtcacttactgt

SEQ ID NO: 5182 - DNA, 20 bp, Artificial Sequence
  Description of Artificial Sequence: Synthetic oligonucleotide
acatctgttgtcacttactg

SEQ ID NO: 5183 - DNA, 20 bp, Artificial Sequence
  Description of Artificial Sequence: Synthetic oligonucleotide
aacatctgttgtcacttact

SEQ ID NO: 5184 - DNA, 20 bp, Artificial Sequence
  Description of Artificial Sequence: Synthetic oligonucleotide
aaacatctgttgtcacttac

SEQ ID NO: 5185 - DNA, 20 bp, Artificial Sequence
  Description of Artificial Sequence: Synthetic oligonucleotide
gaaacatctgttgtcactta

SEQ ID NO: 5186 - DNA, 20 bp, Artificial Sequence
  Description of Artificial Sequence: Synthetic oligonucleotide
tgaaacatctgttgtcactt

SEQ ID NO: 5187 - DNA, 20 bp, Artificial Sequence
  Description of Artificial Sequence: Synthetic oligonucleotide
atgaaacatctgttgtcact

SEQ ID NO: 5188 - DNA, 20 bp, Artificial Sequence
  Description of Artificial Sequence: Synthetic oligonucleotide
gatgaaacatctgttgtcac

SEQ ID NO: 5189 - DNA, 20 bp, Artificial Sequence
  Description of Artificial Sequence: Synthetic oligonucleotide
agatgaaacatctgttgtca

SEQ ID NO: 5190 - DNA, 20 bp, Artificial Sequence
  Description of Artificial Sequence: Synthetic oligonucleotide
attttcatgttcgtttaatc

SEQ ID NO: 5191 - DNA, 20 bp, Artificial Sequence
  Description of Artificial Sequence: Synthetic oligonucleotide
aattttcatgttcgtttaat

SEQ ID NO: 5192 - DNA, 20 bp, Artificial Sequence
  Description of Artificial Sequence: Synthetic oligonucleotide
taattttcatgttcgtttaa

SEQ ID NO: 5193 - DNA, 20 bp, Artificial Sequence
  Description of Artificial Sequence: Synthetic oligonucleotide
ataattttcatgttcgttta

SEQ ID NO: 5194 - DNA, 20 bp, Artificial Sequence
  Description of Artificial Sequence: Synthetic oligonucleotide
aataattttcatgttcgttt

SEQ ID NO: 5195 - DNA, 20 bp, Artificial Sequence
  Description of Artificial Sequence: Synthetic oligonucleotide
gaataattttcatgttcgtt

SEQ ID NO: 5196 - DNA, 20 bp, Artificial Sequence
  Description of Artificial Sequence: Synthetic oligonucleotide
agaataattttcatgttcgt

SEQ ID NO: 5197 - DNA, 20 bp, Artificial Sequence
  Description of Artificial Sequence: Synthetic oligonucleotide
aatggtgaattgccctcgta

SEQ ID NO: 5198 - DNA, 20 bp, Artificial Sequence
  Description of Artificial Sequence: Synthetic oligonucleotide
aaatggtgaattgccctcgt

SEQ ID NO: 5199 - DNA, 20 bp, Artificial Sequence
  Description of Artificial Sequence: Synthetic oligonucleotide
gaaatggtgaattgccctcg

SEQ ID NO: 5200 - DNA, 20 bp, Artificial Sequence
  Description of Artificial Sequence: Synthetic oligonucleotide
tgaaatggtgaattgccctc

SEQ ID NO: 5201 - DNA, 20 bp, Artificial Sequence
  Description of Artificial Sequence: Synthetic oligonucleotide
cacaaatagaagtcaattaa

SEQ ID NO: 5202 - DNA, 20 bp, Artificial Sequence
  Description of Artificial Sequence: Synthetic oligonucleotide
gcacaaatagaagtcaatta

SEQ ID NO: 5203 - DNA, 20 bp, Artificial Sequence
  Description of Artificial Sequence: Synthetic oligonucleotide
agcacaaatagaagtcaatt

SEQ ID NO: 5204 - DNA, 20 bp, Artificial Sequence
  Description of Artificial Sequence: Synthetic oligonucleotide
aagcacaaatagaagtcaat

SEQ ID NO: 5205 - DNA, 20 bp, Artificial Sequence
  Description of Artificial Sequence: Synthetic oligonucleotide
aaagcacaaatagaagtcaa

SEQ ID NO: 5206 - DNA, 20 bp, Artificial Sequence
  Description of Artificial Sequence: Synthetic oligonucleotide
aaaagcacaaatagaagtca

SEQ ID NO: 5207 - DNA, 20 bp, Artificial Sequence
  Description of Artificial Sequence: Synthetic oligonucleotide
aaaaagcacaaatagaagtc

SEQ ID NO: 5208 - DNA, 20 bp, Artificial Sequence
  Description of Artificial Sequence: Synthetic oligonucleotide
taaaaagcacaaatagaagt

SEQ ID NO: 5209 - DNA, 20 bp, Artificial Sequence
  Description of Artificial Sequence: Synthetic oligonucleotide
ctaaaaagcacaaatagaag

SEQ ID NO: 5210 - DNA, 20 bp, Artificial Sequence
  Description of Artificial Sequence: Synthetic oligonucleotide
gctaaaaagcacaaatagaa

SEQ ID NO: 5211 - DNA, 20 bp, Artificial Sequence
  Description of Artificial Sequence: Synthetic oligonucleotide
ggctaaaaagcacaaataga

SEQ ID NO: 5212 - DNA, 20 bp, Artificial Sequence
  Description of Artificial Sequence: Synthetic oligonucleotide
aggctaaaaagcacaaatag

SEQ ID NO: 5213 - DNA, 20 bp, Artificial Sequence
  Description of Artificial Sequence: Synthetic oligonucleotide
aaggctaaaaagcacaaata

SEQ ID NO: 5214 - DNA, 20 bp, Artificial Sequence
  Description of Artificial Sequence: Synthetic oligonucleotide
aaaggctaaaaagcacaaat

SEQ ID NO: 5215 - DNA, 20 bp, Artificial Sequence
  Description of Artificial Sequence: Synthetic oligonucleotide
gaaaggctaaaaagcacaaa

SEQ ID NO: 5216 - DNA, 20 bp, Artificial Sequence
  Description of Artificial Sequence: Synthetic oligonucleotide
agaaaggctaaaaagcacaa

SEQ ID NO: 5217 - DNA, 20 bp, Artificial Sequence
  Description of Artificial Sequence: Synthetic oligonucleotide
cagaaaggctaaaaagcaca

SEQ ID NO: 5218 - DNA, 20 bp, Artificial Sequence
  Description of Artificial Sequence: Synthetic oligonucleotide
gcagaaaggctaaaaagcac

SEQ ID NO: 5219 - DNA, 20 bp, Artificial Sequence
  Description of Artificial Sequence: Synthetic oligonucleotide
agcagaaaggctaaaaagca

SEQ ID NO: 5220 - DNA, 20 bp, Artificial Sequence
  Description of Artificial Sequence: Synthetic oligonucleotide
tagcagaaaggctaaaaagc

SEQ ID NO: 5221 - DNA, 20 bp, Artificial Sequence
  Description of Artificial Sequence: Synthetic oligonucleotide
atagcagaaaggctaaaaag

SEQ ID NO: 5222 - DNA, 20 bp, Artificial Sequence
  Description of Artificial Sequence: Synthetic oligonucleotide
aatagcagaaaggctaaaaa

SEQ ID NO: 5223 - DNA, 20 bp, Artificial Sequence
  Description of Artificial Sequence: Synthetic oligonucleotide
gaatagcagaaaggctaaaa

SEQ ID NO: 5224 - DNA, 20 bp, Artificial Sequence
  Description of Artificial Sequence: Synthetic oligonucleotide
ggaatagcagaaaggctaaa

SEQ ID NO: 5225 - DNA, 20 bp, Artificial Sequence
  Description of Artificial Sequence: Synthetic oligonucleotide
aggaatagcagaaaggctaa

SEQ ID NO: 5226 - DNA, 20 bp, Artificial Sequence
  Description of Artificial Sequence: Synthetic oligonucleotide
aaggaatagcagaaaggcta

SEQ ID NO: 5227 - DNA, 20 bp, Artificial Sequence
  Description of Artificial Sequence: Synthetic oligonucleotide
caaggaatagcagaaaggct

SEQ ID NO: 5228 - DNA, 20 bp, Artificial Sequence
  Description of Artificial Sequence: Synthetic oligonucleotide
acaaggaatagcagaaaggc

SEQ ID NO: 5229 - DNA, 20 bp, Artificial Sequence
  Description of Artificial Sequence: Synthetic oligonucleotide
aacaaggaatagcagaaagg

SEQ ID NO: 5230 - DNA, 20 bp, Artificial Sequence
  Description of Artificial Sequence: Synthetic oligonucleotide
gtccattatcagacatttta

SEQ ID NO: 5231 - DNA, 20 bp, Artificial Sequence
  Description of Artificial Sequence: Synthetic oligonucleotide
ggtccattatcagacatttt

SEQ ID NO: 5232 - DNA, 20 bp, Artificial Sequence
  Description of Artificial Sequence: Synthetic oligonucleotide
gggtccattatcagacattt

SEQ ID NO: 5233 - DNA, 20 bp, Artificial Sequence
  Description of Artificial Sequence: Synthetic oligonucleotide
ggggtccattatcagacatt

SEQ ID NO: 5234 - DNA, 20 bp, Artificial Sequence
  Description of Artificial Sequence: Synthetic oligonucleotide
tggggtccattatcagacat

SEQ ID NO: 5235 - DNA, 20 bp, Artificial Sequence
  Description of Artificial Sequence: Synthetic oligonucleotide
ttggggtccattatcagaca

SEQ ID NO: 5236 - DNA, 20 bp, Artificial Sequence
  Description of Artificial Sequence: Synthetic oligonucleotide
tttggggtccattatcagac

SEQ ID NO: 5237 - DNA, 20 bp, Artificial Sequence
  Description of Artificial Sequence: Synthetic oligonucleotide
ttttggggtccattatcaga

SEQ ID NO: 5238 - DNA, 20 bp, Artificial Sequence
  Description of Artificial Sequence: Synthetic oligonucleotide
ttattgggtaaaccttgggg

SEQ ID NO: 5239 - DNA, 20 bp, Artificial Sequence
  Description of Artificial Sequence: Synthetic oligonucleotide
attattgggtaaaccttggg

SEQ ID NO: 5240 - DNA, 20 bp, Artificial Sequence
  Description of Artificial Sequence: Synthetic oligonucleotide
tattattgggtaaaccttgg

SEQ ID NO: 5241 - DNA, 20 bp, Artificial Sequence
  Description of Artificial Sequence: Synthetic oligonucleotide
gtattattgggtaaaccttg

SEQ ID NO: 5242 - DNA, 20 bp, Artificial Sequence
  Description of Artificial Sequence: Synthetic oligonucleotide
agtattattgggtaaacctt

SEQ ID NO: 5243 - DNA, 20 bp, Artificial Sequence
  Description of Artificial Sequence: Synthetic oligonucleotide
cagtattattgggtaaacct

SEQ ID NO: 5244 - DNA, 20 bp, Artificial Sequence
  Description of Artificial Sequence: Synthetic oligonucleotide
gcagtattattgggtaaacc

SEQ ID NO: 5245 - DNA, 20 bp, Artificial Sequence
  Description of Artificial Sequence: Synthetic oligonucleotide
cgcagtattattgggtaaac

SEQ ID NO: 5246 - DNA, 20 bp, Artificial Sequence
  Description of Artificial Sequence: Synthetic oligonucleotide
acgcagtattattgggtaaa

SEQ ID NO: 5247 - DNA, 20 bp, Artificial Sequence
  Description of Artificial Sequence: Synthetic oligonucleotide
gacgcagtattattgggtaa

SEQ ID NO: 5248 - DNA, 20 bp, Artificial Sequence
  Description of Artificial Sequence: Synthetic oligonucleotide
agacgcagtattattgggta

SEQ ID NO: 5249 - DNA, 20 bp, Artificial Sequence
  Description of Artificial Sequence: Synthetic oligonucleotide
aagacgcagtattattgggt

SEQ ID NO: 5250 - DNA, 20 bp, Artificial Sequence
  Description of Artificial Sequence: Synthetic oligonucleotide
caagacgcagtattattggg

SEQ ID NO: 5251 - DNA, 20 bp, Artificial Sequence
  Description of Artificial Sequence: Synthetic oligonucleotide
ccaagacgcagtattattgg

SEQ ID NO: 5252 - DNA, 20 bp, Artificial Sequence
  Description of Artificial Sequence: Synthetic oligonucleotide
accaagacgcagtattattg

SEQ ID NO: 5253 - DNA, 20 bp, Artificial Sequence
  Description of Artificial Sequence: Synthetic oligonucleotide
aaccaagacgcagtattatt

SEQ ID NO: 5254 - DNA, 20 bp, Artificial Sequence
  Description of Artificial Sequence: Synthetic oligonucleotide
gaaccaagacgcagtattat

SEQ ID NO: 5255 - DNA, 20 bp, Artificial Sequence
  Description of Artificial Sequence: Synthetic oligonucleotide
tgaaccaagacgcagtatta

SEQ ID NO: 5256 - DNA, 20 bp, Artificial Sequence
  Description of Artificial Sequence: Synthetic oligonucleotide
gtgaaccaagacgcagtatt

SEQ ID NO: 5257 - DNA, 20 bp, Artificial Sequence
  Description of Artificial Sequence: Synthetic oligonucleotide
agtagccaatttggtcatct

SEQ ID NO: 5258 - DNA, 20 bp, Artificial Sequence
  Description of Artificial Sequence: Synthetic oligonucleotide
tagtagccaatttggtcatc

SEQ ID NO: 5259 - DNA, 20 bp, Artificial Sequence
  Description of Artificial Sequence: Synthetic oligonucleotide
gtagtagccaatttggtcat

SEQ ID NO: 5260 - DNA, 20 bp, Artificial Sequence
  Description of Artificial Sequence: Synthetic oligonucleotide
ggtagtagccaatttggtca

SEQ ID NO: 5261 - DNA, 20 bp, Artificial Sequence
  Description of Artificial Sequence: Synthetic oligonucleotide
cggtagtagccaatttggtc

SEQ ID NO: 5262 - DNA, 20 bp, Artificial Sequence
  Description of Artificial Sequence: Synthetic oligonucleotide
tcggtagtagccaatttggt

SEQ ID NO: 5263 - DNA, 20 bp, Artificial Sequence
  Description of Artificial Sequence: Synthetic oligonucleotide
ttcggtagtagccaatttgg

SEQ ID NO: 5264 - DNA, 20 bp, Artificial Sequence
  Description of Artificial Sequence: Synthetic oligonucleotide
cttcggtagtagccaatttg

SEQ ID NO: 5265 - DNA, 20 bp, Artificial Sequence
  Description of Artificial Sequence: Synthetic oligonucleotide
tcttcggtagtagccaattt

SEQ ID NO: 5266 - DNA, 20 bp, Artificial Sequence
  Description of Artificial Sequence: Synthetic oligonucleotide
ctcttcggtagtagccaatt

SEQ ID NO: 5267 - DNA, 20 bp, Artificial Sequence
  Description of Artificial Sequence: Synthetic oligonucleotide
gctcttcggtagtagccaat

SEQ ID NO: 5268 - DNA, 20 bp, Artificial Sequence
  Description of Artificial Sequence: Synthetic oligonucleotide
agctcttcggtagtagccaa

SEQ ID NO: 5269 - DNA, 20 bp, Artificial Sequence
  Description of Artificial Sequence: Synthetic oligonucleotide
tagctcttcggtagtagcca

SEQ ID NO: 5270 - DNA, 20 bp, Artificial Sequence
  Description of Artificial Sequence: Synthetic oligonucleotide
gtagctcttcggtagtagcc

SEQ ID NO: 5271 - DNA, 20 bp, Artificial Sequence
  Description of Artificial Sequence: Synthetic oligonucleotide
ggtagctcttcggtagtagc

SEQ ID NO: 5272 - DNA, 20 bp, Artificial Sequence
  Description of Artificial Sequence: Synthetic oligonucleotide
ttcaaggctccctcagttgc

SEQ ID NO: 5273 - DNA, 20 bp, Artificial Sequence
  Description of Artificial Sequence: Synthetic oligonucleotide
ggattgcgggtgccaatgtg

SEQ ID NO: 5274 - DNA, 20 bp, Artificial Sequence
  Description of Artificial Sequence: Synthetic oligonucleotide
aggattgcgggtgccaatgt

SEQ ID NO: 5275 - DNA, 20 bp, Artificial Sequence
  Description of Artificial Sequence: Synthetic oligonucleotide
cttgaggaagttgtagcacg

SEQ ID NO: 5276 - DNA, 20 bp, Artificial Sequence
  Description of Artificial Sequence: Synthetic oligonucleotide
ccttgaggaagttgtagcac

SEQ ID NO: 5277 - DNA, 20 bp, Artificial Sequence
  Description of Artificial Sequence: Synthetic oligonucleotide
tccttgaggaagttgtagca

SEQ ID NO: 5278 - DNA, 20 bp, Artificial Sequence
  Description of Artificial Sequence: Synthetic oligonucleotide
ttccttgaggaagttgtagc

SEQ ID NO: 5279 - DNA, 20 bp, Artificial Sequence
  Description of Artificial Sequence: Synthetic oligonucleotide
gttccttgaggaagttgtag

SEQ ID NO: 5280 - DNA, 20 bp, Artificial Sequence
  Description of Artificial Sequence: Synthetic oligonucleotide
tgttccttgaggaagttgta

SEQ ID NO: 5281 - DNA, 20 bp, Artificial Sequence
  Description of Artificial Sequence: Synthetic oligonucleotide
ttgttccttgaggaagttgt

SEQ ID NO: 5282 - DNA, 20 bp, Artificial Sequence
  Description of Artificial Sequence: Synthetic oligonucleotide
gttgttccttgaggaagttg

SEQ ID NO: 5283 - DNA, 20 bp, Artificial Sequence
  Description of Artificial Sequence: Synthetic oligonucleotide
tgttgttccttgaggaagtt

SEQ ID NO: 5284 - DNA, 20 bp, Artificial Sequence
  Description of Artificial Sequence: Synthetic oligonucleotide
atgttgttccttgaggaagt

SEQ ID NO: 5285 - DNA, 20 bp, Artificial Sequence
  Description of Artificial Sequence: Synthetic oligonucleotide
aatgttgttccttgaggaag

SEQ ID NO: 5286 - DNA, 20 bp, Artificial Sequence
  Description of Artificial Sequence: Synthetic oligonucleotide
caatgttgttccttgaggaa

SEQ ID NO: 5287 - DNA, 20 bp, Artificial Sequence
  Description of Artificial Sequence: Synthetic oligonucleotide
gcaatgttgttccttgagga

SEQ ID NO: 5288 - DNA, 20 bp, Artificial Sequence
  Description of Artificial Sequence: Synthetic oligonucleotide
ggcaatgttgttccttgagg

SEQ ID NO: 5289 - DNA, 20 bp, Artificial Sequence
  Description of Artificial Sequence: Synthetic oligonucleotide
tggcaatgttgttccttgag

SEQ ID NO: 5290 - DNA, 20 bp, Artificial Sequence
  Description of Artificial Sequence: Synthetic oligonucleotide
ttggcaatgttgttccttga

SEQ ID NO: 5291 - DNA, 20 bp, Artificial Sequence
  Description of Artificial Sequence: Synthetic oligonucleotide
tttggcaatgttgttccttg

SEQ ID NO: 5292 - DNA, 20 bp, Artificial Sequence
  Description of Artificial Sequence: Synthetic oligonucleotide
ttttggcaatgttgttcctt

SEQ ID NO: 5293 - DNA, 20 bp, Artificial Sequence
  Description of Artificial Sequence: Synthetic oligonucleotide
cttttggcaatgttgttcct

SEQ ID NO: 5294 - DNA, 20 bp, Artificial Sequence
  Description of Artificial Sequence: Synthetic oligonucleotide
ccttttggcaatgttgttcc

SEQ ID NO: 5295 - DNA, 20 bp, Artificial Sequence
  Description of Artificial Sequence: Synthetic oligonucleotide
gccttttggcaatgttgttc

SEQ ID NO: 5296 - DNA, 20 bp, Artificial Sequence
  Description of Artificial Sequence: Synthetic oligonucleotide
agccttttggcaatgttgtt

SEQ ID NO: 5297 - DNA, 20 bp, Artificial Sequence
  Description of Artificial Sequence: Synthetic oligonucleotide
aagccttttggcaatgttgt

SEQ ID NO: 5298 - DNA, 20 bp, Artificial Sequence
  Description of Artificial Sequence: Synthetic oligonucleotide
gaagccttttggcaatgttg

SEQ ID NO: 5299 - DNA, 20 bp, Artificial Sequence
  Description of Artificial Sequence: Synthetic oligonucleotide
agaagccttttggcaatgtt

SEQ ID NO: 5300 - DNA, 20 bp, Artificial Sequence
  Description of Artificial Sequence: Synthetic oligonucleotide
tagaagccttttggcaatgt

SEQ ID NO: 5301 - DNA, 20 bp, Artificial Sequence
  Description of Artificial Sequence: Synthetic oligonucleotide
gtagaagccttttggcaatg

SEQ ID NO: 5302 - DNA, 20 bp, Artificial Sequence
  Description of Artificial Sequence: Synthetic oligonucleotide
cgtagaagccttttggcaat

SEQ ID NO: 5303 - DNA, 20 bp, Artificial Sequence
  Description of Artificial Sequence: Synthetic oligonucleotide
gcgtagaagccttttggcaa

SEQ ID NO: 5304 - DNA, 20 bp, Artificial Sequence
  Description of Artificial Sequence: Synthetic oligonucleotide
tgcgtagaagccttttggca

SEQ ID NO: 5305 - DNA, 20 bp, Artificial Sequence
  Description of Artificial Sequence: Synthetic oligonucleotide
ctgcgtagaagccttttggc

SEQ ID NO: 5306 - DNA, 20 bp, Artificial Sequence
  Description of Artificial Sequence: Synthetic oligonucleotide
tctgcgtagaagccttttgg

SEQ ID NO: 5307 - DNA, 20 bp, Artificial Sequence
  Description of Artificial Sequence: Synthetic oligonucleotide
gcttgactgccgcctctgct

SEQ ID NO: 5308 - DNA, 20 bp, Artificial Sequence
  Description of Artificial Sequence: Synthetic oligonucleotide
ggcttgactgccgcctctgc

SEQ ID NO: 5309 - DNA, 20 bp, Artificial Sequence
  Description of Artificial Sequence: Synthetic oligonucleotide
aggcttgactgccgcctctg

SEQ ID NO: 5310 - DNA, 20 bp, Artificial Sequence
  Description of Artificial Sequence: Synthetic oligonucleotide
gaggcttgactgccgcctct

SEQ ID NO: 5311 - DNA, 20 bp, Artificial Sequence
  Description of Artificial Sequence: Synthetic oligonucleotide
agaggcttgactgccgcctc

SEQ ID NO: 5312 - DNA, 20 bp, Artificial Sequence
  Description of Artificial Sequence: Synthetic oligonucleotide
aagaggcttgactgccgcct

SEQ ID NO: 5313 - DNA, 20 bp, Artificial Sequence
  Description of Artificial Sequence: Synthetic oligonucleotide
gaagaggcttgactgccgcc

SEQ ID NO: 5314 - DNA, 20 bp, Artificial Sequence
  Description of Artificial Sequence: Synthetic oligonucleotide
agaagaggcttgactgccgc

SEQ ID NO: 5315 - DNA, 20 bp, Artificial Sequence
  Description of Artificial Sequence: Synthetic oligonucleotide
gagaagaggcttgactgccg

SEQ ID NO: 5316 - DNA, 20 bp, Artificial Sequence
  Description of Artificial Sequence: Synthetic oligonucleotide
cgagaagaggcttgactgcc

SEQ ID NO: 5317 - DNA, 20 bp, Artificial Sequence
  Description of Artificial Sequence: Synthetic oligonucleotide
tcaagctggttcaatctgtc

SEQ ID NO: 5318 - DNA, 20 bp, Artificial Sequence
  Description of Artificial Sequence: Synthetic oligonucleotide
ctcaagctggttcaatctgt

SEQ ID NO: 5319 - DNA, 20 bp, Artificial Sequence
  Description of Artificial Sequence: Synthetic oligonucleotide
tctcaagctggttcaatctg

SEQ ID NO: 5320 - DNA, 20 bp, Artificial Sequence
  Description of Artificial Sequence: Synthetic oligonucleotide
ctctcaagctggttcaatct

SEQ ID NO: 5321 - DNA, 20 bp, Artificial Sequence
  Description of Artificial Sequence: Synthetic oligonucleotide
gctctcaagctggttcaatc

SEQ ID NO: 5322 - DNA, 20 bp, Artificial Sequence
  Description of Artificial Sequence: Synthetic oligonucleotide
tgctctcaagctggttcaat

SEQ ID NO: 5323 - DNA, 20 bp, Artificial Sequence
  Description of Artificial Sequence: Synthetic oligonucleotide
ttgctctcaagctggttcaa

SEQ ID NO: 5324 - DNA, 20 bp, Artificial Sequence
  Description of Artificial Sequence: Synthetic oligonucleotide
tttgctctcaagctggttca

SEQ ID NO: 5325 - DNA, 20 bp, Artificial Sequence
  Description of Artificial Sequence: Synthetic oligonucleotide
tgttgttggcctttaccaga

SEQ ID NO: 5326 - DNA, 20 bp, Artificial Sequence
  Description of Artificial Sequence: Synthetic oligonucleotide
ttgttgttggcctttaccag

SEQ ID NO: 5327 - DNA, 20 bp, Artificial Sequence
  Description of Artificial Sequence: Synthetic oligonucleotide
gttgttgttggcctttacca

SEQ ID NO: 5328 - DNA, 20 bp, Artificial Sequence
  Description of Artificial Sequence: Synthetic oligonucleotide
tgttgttgttggcctttacc

SEQ ID NO: 5329 - DNA, 20 bp, Artificial Sequence
  Description of Artificial Sequence: Synthetic oligonucleotide
ttgttgttgttggcctttac

SEQ ID NO: 5330 - DNA, 20 bp, Artificial Sequence
  Description of Artificial Sequence: Synthetic oligonucleotide
cttgttgttgttggccttta

SEQ ID NO: 5331 - DNA, 20 bp, Artificial Sequence
  Description of Artificial Sequence: Synthetic oligonucleotide
ccttgttgttgttggccttt

SEQ ID NO: 5332 - DNA, 20 bp, Artificial Sequence
  Description of Artificial Sequence: Synthetic oligonucleotide
gccttgttgttgttggcctt

SEQ ID NO: 5333 - DNA, 20 bp, Artificial Sequence
  Description of Artificial Sequence: Synthetic oligonucleotide
ggccttgttgttgttggcct

SEQ ID NO: 5334 - DNA, 20 bp, Artificial Sequence
  Description of Artificial Sequence: Synthetic oligonucleotide
tggccttgttgttgttggcc

SEQ ID NO: 5335 - DNA, 20 bp, Artificial Sequence
  Description of Artificial Sequence: Synthetic oligonucleotide
ttggccttgttgttgttggc

SEQ ID NO: 5336 - DNA, 20 bp, Artificial Sequence
  Description of Artificial Sequence: Synthetic oligonucleotide
tttggccttgttgttgttgg

SEQ ID NO: 5337 - DNA, 20 bp, Artificial Sequence
  Description of Artificial Sequence: Synthetic oligonucleotide
gtttggccttgttgttgttg

SEQ ID NO: 5338 - DNA, 20 bp, Artificial Sequence
  Description of Artificial Sequence: Synthetic oligonucleotide
agtttggccttgttgttgtt

SEQ ID NO: 5339 - DNA, 20 bp, Artificial Sequence
  Description of Artificial Sequence: Synthetic oligonucleotide
cagtttggccttgttgttgt

SEQ ID NO: 5340 - DNA, 20 bp, Artificial Sequence
  Description of Artificial Sequence: Synthetic oligonucleotide
acagtttggccttgttgttg

SEQ ID NO: 5341 - DNA, 20 bp, Artificial Sequence
  Description of Artificial Sequence: Synthetic oligonucleotide
gacagtttggccttgttgtt

SEQ ID NO: 5342 - DNA, 20 bp, Artificial Sequence
  Description of Artificial Sequence: Synthetic oligonucleotide
tgacagtttggccttgttgt

SEQ ID NO: 5343 - DNA, 20 bp, Artificial Sequence
  Description of Artificial Sequence: Synthetic oligonucleotide
gtgacagtttggccttgttg

SEQ ID NO: 5344 - DNA, 20 bp, Artificial Sequence
  Description of Artificial Sequence: Synthetic oligonucleotide
agtgacagtttggccttgtt

SEQ ID NO: 5345 - DNA, 20 bp, Artificial Sequence
  Description of Artificial Sequence: Synthetic oligonucleotide
tagtgacagtttggccttgt

SEQ ID NO: 5346 - DNA, 20 bp, Artificial Sequence
  Description of Artificial Sequence: Synthetic oligonucleotide
ttagtgacagtttggccttg

SEQ ID NO: 5347 - DNA, 20 bp, Artificial Sequence
  Description of Artificial Sequence: Synthetic oligonucleotide
cttagtgacagtttggcctt

SEQ ID NO: 5348 - DNA, 20 bp, Artificial Sequence
  Description of Artificial Sequence: Synthetic oligonucleotide
tcttagtgacagtttggcct

SEQ ID NO: 5349 - DNA, 20 bp, Artificial Sequence
  Description of Artificial Sequence: Synthetic oligonucleotide
ttcttagtgacagtttggcc

SEQ ID NO: 5350 - DNA, 20 bp, Artificial Sequence
  Description of Artificial Sequence: Synthetic oligonucleotide
tttcttagtgacagtttggc

SEQ ID NO: 5351 - DNA, 20 bp, Artificial Sequence
  Description of Artificial Sequence: Synthetic oligonucleotide
atttcttagtgacagtttgg

SEQ ID NO: 5352 - DNA, 20 bp, Artificial Sequence
  Description of Artificial Sequence: Synthetic oligonucleotide
gatttcttagtgacagtttg

SEQ ID NO: 5353 - DNA, 20 bp, Artificial Sequence
  Description of Artificial Sequence: Synthetic oligonucleotide
agatttcttagtgacagttt

SEQ ID NO: 5354 - DNA, 20 bp, Artificial Sequence
  Description of Artificial Sequence: Synthetic oligonucleotide
cagatttcttagtgacagtt

SEQ ID NO: 5355 - DNA, 20 bp, Artificial Sequence
  Description of Artificial Sequence: Synthetic oligonucleotide
gcagatttcttagtgacagt

SEQ ID NO: 5356 - DNA, 20 bp, Artificial Sequence
  Description of Artificial Sequence: Synthetic oligonucleotide
agcagatttcttagtgacag

SEQ ID NO: 5357 - DNA, 20 bp, Artificial Sequence
  Description of Artificial Sequence: Synthetic oligonucleotide
cagcagatttcttagtgaca

SEQ ID NO: 5358 - DNA, 20 bp, Artificial Sequence
  Description of Artificial Sequence: Synthetic oligonucleotide
gcagcagatttcttagtgac

SEQ ID NO: 5359 - DNA, 20 bp, Artificial Sequence
  Description of Artificial Sequence: Synthetic oligonucleotide
agcagcagatttcttagtga

SEQ ID NO: 5360 - DNA, 20 bp, Artificial Sequence
  Description of Artificial Sequence: Synthetic oligonucleotide
cagcagcagatttcttagtg

SEQ ID NO: 5361 - DNA, 20 bp, Artificial Sequence
  Description of Artificial Sequence: Synthetic oligonucleotide
tcagcagcagatttcttagt

SEQ ID NO: 5362 - DNA, 20 bp, Artificial Sequence
  Description of Artificial Sequence: Synthetic oligonucleotide
ctcagcagcagatttcttag

SEQ ID NO: 5363 - DNA, 20 bp, Artificial Sequence
  Description of Artificial Sequence: Synthetic oligonucleotide
cctcagcagcagatttctta

SEQ ID NO: 5364 - DNA, 20 bp, Artificial Sequence
  Description of Artificial Sequence: Synthetic oligonucleotide
gcctcagcagcagatttctt

SEQ ID NO: 5365 - DNA, 20 bp, Artificial Sequence
  Description of Artificial Sequence: Synthetic oligonucleotide
tcagttccttgtctgattag

SEQ ID NO: 5366 - DNA, 20 bp, Artificial Sequence
  Description of Artificial Sequence: Synthetic oligonucleotide
atcagttccttgtctgatta

SEQ ID NO: 5367 - DNA, 20 bp, Artificial Sequence
  Description of Artificial Sequence: Synthetic oligonucleotide
aatcagttccttgtctgatt

SEQ ID NO: 5368 - DNA, 20 bp, Artificial Sequence
  Description of Artificial Sequence: Synthetic oligonucleotide
taatcagttccttgtctgat

SEQ ID NO: 5369 - DNA, 20 bp, Artificial Sequence
  Description of Artificial Sequence: Synthetic oligonucleotide
gtaatcagttccttgtctga

SEQ ID NO: 5370 - DNA, 20 bp, Artificial Sequence
  Description of Artificial Sequence: Synthetic oligonucleotide
tgtaatcagttccttgtctg

SEQ ID NO: 5371 - DNA, 20 bp, Artificial Sequence
  Description of Artificial Sequence: Synthetic oligonucleotide
ttgtaatcagttccttgtct

SEQ ID NO: 5372 - DNA, 20 bp, Artificial Sequence
  Description of Artificial Sequence: Synthetic oligonucleotide
tttgtaatcagttccttgtc

SEQ ID NO: 5373 - DNA, 20 bp, Artificial Sequence
  Description of Artificial Sequence: Synthetic oligonucleotide
gtttgtaatcagttccttgt

SEQ ID NO: 5374 - DNA, 20 bp, Artificial Sequence
  Description of Artificial Sequence: Synthetic oligonucleotide
tgtttgtaatcagttccttg

SEQ ID NO: 5375 - DNA, 20 bp, Artificial Sequence
  Description of Artificial Sequence: Synthetic oligonucleotide
aattgtgcaatttgcggcca

SEQ ID NO: 5376 - DNA, 20 bp, Artificial Sequence
  Description of Artificial Sequence: Synthetic oligonucleotide
aaattgtgcaatttgcggcc

SEQ ID NO: 5377 - DNA, 20 bp, Artificial Sequence
  Description of Artificial Sequence: Synthetic oligonucleotide
caaattgtgcaatttgcggc

SEQ ID NO: 5378 - DNA, 20 bp, Artificial Sequence
  Description of Artificial Sequence: Synthetic oligonucleotide
gcaaattgtgcaatttgcgg

SEQ ID NO: 5379 - DNA, 20 bp, Artificial Sequence
  Description of Artificial Sequence: Synthetic oligonucleotide
gtgacttccatgccaatgcg

SEQ ID NO: 5380 - DNA, 20 bp, Artificial Sequence
  Description of Artificial Sequence: Synthetic oligonucleotide
tgtgacttccatgccaatgc

SEQ ID NO: 5381 - DNA, 20 bp, Artificial Sequence
  Description of Artificial Sequence: Synthetic oligonucleotide
gtgtgacttccatgccaatg

SEQ ID NO: 5382 - DNA, 20 bp, Artificial Sequence
  Description of Artificial Sequence: Synthetic oligonucleotide
ggtgtgacttccatgccaat

SEQ ID NO: 5383 - DNA, 20 bp, Artificial Sequence
  Description of Artificial Sequence: Synthetic oligonucleotide
aggtgtgacttccatgccaa

SEQ ID NO: 5384 - DNA, 20 bp, Artificial Sequence
  Description of Artificial Sequence: Synthetic oligonucleotide
aaggtgtgacttccatgcca

SEQ ID NO: 5385 - DNA, 20 bp, Artificial Sequence
  Description of Artificial Sequence: Synthetic oligonucleotide
gaaggtgtgacttccatgcc

SEQ ID NO: 5386 - DNA, 20 bp, Artificial Sequence
  Description of Artificial Sequence: Synthetic oligonucleotide
cgaaggtgtgacttccatgc

SEQ ID NO: 5387 - DNA, 20 bp, Artificial Sequence
  Description of Artificial Sequence: Synthetic oligonucleotide
ccgaaggtgtgacttccatg

SEQ ID NO: 5388 - DNA, 20 bp, Artificial Sequence
  Description of Artificial Sequence: Synthetic oligonucleotide
cccgaaggtgtgacttccat

SEQ ID NO: 5389 - DNA, 20 bp, Artificial Sequence
  Description of Artificial Sequence: Synthetic oligonucleotide
tcccgaaggtgtgacttcca

SEQ ID NO: 5390 - DNA, 20 bp, Artificial Sequence
  Description of Artificial Sequence: Synthetic oligonucleotide
ttcccgaaggtgtgacttcc

SEQ ID NO: 5391 - DNA, 20 bp, Artificial Sequence
  Description of Artificial Sequence: Synthetic oligonucleotide
gttcccgaaggtgtgacttc

SEQ ID NO: 5392 - DNA, 20 bp, Artificial Sequence
  Description of Artificial Sequence: Synthetic oligonucleotide
ggatctttgtcatccaattt

SEQ ID NO: 5393 - DNA, 20 bp, Artificial Sequence
  Description of Artificial Sequence: Synthetic oligonucleotide
tggatctttgtcatccaatt

SEQ ID NO: 5394 - DNA, 20 bp, Artificial Sequence
  Description of Artificial Sequence: Synthetic oligonucleotide
aatgttttgtatgcgtcaat

SEQ ID NO: 5395 - DNA, 20 bp, Artificial Sequence
  Description of Artificial Sequence: Synthetic oligonucleotide
gaatgttttgtatgcgtcaa

SEQ ID NO: 5396 - DNA, 20 bp, Artificial Sequence
  Description of Artificial Sequence: Synthetic oligonucleotide
ggaatgttttgtatgcgtca

SEQ ID NO: 5397 - DNA, 20 bp, Artificial Sequence
  Description of Artificial Sequence: Synthetic oligonucleotide
gggaatgttttgtatgcgtc

SEQ ID NO: 5398 - DNA, 20 bp, Artificial Sequence
  Description of Artificial Sequence: Synthetic oligonucleotide
tgggaatgttttgtatgcgt

SEQ ID NO: 5399 - DNA, 20 bp, Artificial Sequence
  Description of Artificial Sequence: Synthetic oligonucleotide
gtgggaatgttttgtatgcg

SEQ ID NO: 5400 - DNA, 20 bp, Artificial Sequence
  Description of Artificial Sequence: Synthetic oligonucleotide
ggtgggaatgttttgtatgc

SEQ ID NO: 5401 - DNA, 20 bp, Artificial Sequence
  Description of Artificial Sequence: Synthetic oligonucleotide
tggtgggaatgttttgtatg

SEQ ID NO: 5402 - DNA, 20 bp, Artificial Sequence
  Description of Artificial Sequence: Synthetic oligonucleotide
ttggtgggaatgttttgtat

SEQ ID NO: 5403 - DNA, 20 bp, Artificial Sequence
  Description of Artificial Sequence: Synthetic oligonucleotide
gttggtgggaatgttttgta

SEQ ID NO: 5404 - DNA, 20 bp, Artificial Sequence
  Description of Artificial Sequence: Synthetic oligonucleotide
tgttggtgggaatgttttgt

SEQ ID NO: 5405 - DNA, 20 bp, Artificial Sequence
  Description of Artificial Sequence: Synthetic oligonucleotide
ctgttggtgggaatgttttg

SEQ ID NO: 5406 - DNA, 20 bp, Artificial Sequence
  Description of Artificial Sequence: Synthetic oligonucleotide
tctgttggtgggaatgtttt

SEQ ID NO: 5407 - DNA, 20 bp, Artificial Sequence
  Description of Artificial Sequence: Synthetic oligonucleotide
ctctgttggtgggaatgttt

SEQ ID NO: 5408 - DNA, 20 bp, Artificial Sequence
  Description of Artificial Sequence: Synthetic oligonucleotide
gctctgttggtgggaatgtt

SEQ ID NO: 5409 - DNA, 20 bp, Artificial Sequence
  Description of Artificial Sequence: Synthetic oligonucleotide
ggctctgttggtgggaatgt

SEQ ID NO: 5410 - DNA, 20 bp, Artificial Sequence
  Description of Artificial Sequence: Synthetic oligonucleotide
aggctctgttggtgggaatg

SEQ ID NO: 5411 - DNA, 20 bp, Artificial Sequence
  Description of Artificial Sequence: Synthetic oligonucleotide
taggctctgttggtgggaat

SEQ ID NO: 5412 - DNA, 20 bp, Artificial Sequence
  Description of Artificial Sequence: Synthetic oligonucleotide
ttaggctctgttggtgggaa

SEQ ID NO: 5413 - DNA, 20 bp, Artificial Sequence
  Description of Artificial Sequence: Synthetic oligonucleotide
tttaggctctgttggtggga

SEQ ID NO: 5414 - DNA, 20 bp, Artificial Sequence
  Description of Artificial Sequence: Synthetic oligonucleotide
ttttaggctctgttggtggg

SEQ ID NO: 5415 - DNA, 20 bp, Artificial Sequence
  Description of Artificial Sequence: Synthetic oligonucleotide
tttttaggctctgttggtgg

SEQ ID NO: 5416 - DNA, 20 bp, Artificial Sequence
  Description of Artificial Sequence: Synthetic oligonucleotide
ctttttaggctctgttggtg

SEQ ID NO: 5417 - DNA, 20 bp, Artificial Sequence
  Description of Artificial Sequence: Synthetic oligonucleotide
cctttttaggctctgttggt

SEQ ID NO: 5418 - DNA, 20 bp, Artificial Sequence
  Description of Artificial Sequence: Synthetic oligonucleotide
tcctttttaggctctgttgg

SEQ ID NO: 5419 - DNA, 20 bp, Artificial Sequence
  Description of Artificial Sequence: Synthetic oligonucleotide
gtcctttttaggctctgttg

SEQ ID NO: 5420 - DNA, 20 bp, Artificial Sequence
  Description of Artificial Sequence: Synthetic oligonucleotide
tgtcctttttaggctctgtt

SEQ ID NO: 5421 - DNA, 20 bp, Artificial Sequence
  Description of Artificial Sequence: Synthetic oligonucleotide
ttgtcctttttaggctctgt

SEQ ID NO: 5422 - DNA, 20 bp, Artificial Sequence
  Description of Artificial Sequence: Synthetic oligonucleotide
tttgtcctttttaggctctg

SEQ ID NO: 5423 - DNA, 20 bp, Artificial Sequence
  Description of Artificial Sequence: Synthetic oligonucleotide
ttttgtcctttttaggctct

SEQ ID NO: 5424 - DNA, 20 bp, Artificial Sequence
  Description of Artificial Sequence: Synthetic oligonucleotide
tttttgtcctttttaggctc

SEQ ID NO: 5425 - DNA, 20 bp, Artificial Sequence
  Description of Artificial Sequence: Synthetic oligonucleotide
ctttttgtcctttttaggct

SEQ ID NO: 5426 - DNA, 20 bp, Artificial Sequence
  Description of Artificial Sequence: Synthetic oligonucleotide
tctttttgtcctttttaggc

SEQ ID NO: 5427 - DNA, 20 bp, Artificial Sequence
  Description of Artificial Sequence: Synthetic oligonucleotide
ttctttttgtcctttttagg

SEQ ID NO: 5428 - DNA, 20 bp, Artificial Sequence
  Description of Artificial Sequence: Synthetic oligonucleotide
gcaggaagaagagtcacagt

SEQ ID NO: 5429 - DNA, 20 bp, Artificial Sequence
  Description of Artificial Sequence: Synthetic oligonucleotide
cccatctgccttgtgtggtc

SEQ ID NO: 5430 - DNA, 20 bp, Artificial Sequence
  Description of Artificial Sequence: Synthetic oligonucleotide
gcccatctgccttgtgtggt

SEQ ID NO: 5431 - DNA, 20 bp, Artificial Sequence
  Description of Artificial Sequence: Synthetic oligonucleotide
agcccatctgccttgtgtgg

SEQ ID NO: 5432 - DNA, 20 bp, Artificial Sequence
  Description of Artificial Sequence: Synthetic oligonucleotide
tagcccatctgccttgtgtg

SEQ ID NO: 5433 - DNA, 20 bp, Artificial Sequence
  Description of Artificial Sequence: Synthetic oligonucleotide
atagcccatctgccttgtgt

SEQ ID NO: 5434 - DNA, 20 bp, Artificial Sequence
  Description of Artificial Sequence: Synthetic oligonucleotide
tctgcacaagagtagactat

SEQ ID NO: 5435 - DNA, 20 bp, Artificial Sequence
  Description of Artificial Sequence: Synthetic oligonucleotide
ttctgcacaagagtagacta

SEQ ID NO: 5436 - DNA, 20 bp, Artificial Sequence
  Description of Artificial Sequence: Synthetic oligonucleotide
attctgcacaagagtagact

SEQ ID NO: 5437 - DNA, 20 bp, Artificial Sequence
  Description of Artificial Sequence: Synthetic oligonucleotide
cattctgcacaagagtagac

SEQ ID NO: 5438 - DNA, 20 bp, Artificial Sequence
  Description of Artificial Sequence: Synthetic oligonucleotide
tcattctgcacaagagtaga

SEQ ID NO: 5439 - DNA, 20 bp, Artificial Sequence
  Description of Artificial Sequence: Synthetic oligonucleotide
ttcattctgcacaagagtag

SEQ ID NO: 5440 - DNA, 20 bp, Artificial Sequence
  Description of Artificial Sequence: Synthetic oligonucleotide
attcattctgcacaagagta

SEQ ID NO: 5441 - DNA, 20 bp, Artificial Sequence
  Description of Artificial Sequence: Synthetic oligonucleotide
aattcattctgcacaagagt

SEQ ID NO: 5442 - DNA, 20 bp, Artificial Sequence
  Description of Artificial Sequence: Synthetic oligonucleotide
gaattcattctgcacaagag

SEQ ID NO: 5443 - DNA, 20 bp, Artificial Sequence
  Description of Artificial Sequence: Synthetic oligonucleotide
agaattcattctgcacaaga

SEQ ID NO: 5444 - DNA, 20 bp, Artificial Sequence
  Description of Artificial Sequence: Synthetic oligonucleotide
gagaattcattctgcacaag

SEQ ID NO: 5445 - DNA, 20 bp, Artificial Sequence
  Description of Artificial Sequence: Synthetic oligonucleotide
cgagaattcattctgcacaa

SEQ ID NO: 5446 - DNA, 20 bp, Artificial Sequence
  Description of Artificial Sequence: Synthetic oligonucleotide
acgagaattcattctgcaca

SEQ ID NO: 5447 - DNA, 20 bp, Artificial Sequence
  Description of Artificial Sequence: Synthetic oligonucleotide
tacgagaattcattctgcac

SEQ ID NO: 5448 - DNA, 20 bp, Artificial Sequence
  Description of Artificial Sequence: Synthetic oligonucleotide
tgtgagattaaagttaacta

SEQ ID NO: 5449 - DNA, 20 bp, Artificial Sequence
  Description of Artificial Sequence: Synthetic oligonucleotide
atgtgagattaaagttaact

SEQ ID NO: 5450 - DNA, 20 bp, Artificial Sequence
  Description of Artificial Sequence: Synthetic oligonucleotide
tatgtgagattaaagttaac

SEQ ID NO: 5451 - DNA, 20 bp, Artificial Sequence
  Description of Artificial Sequence: Synthetic oligonucleotide
ctatgtgagattaaagttaa

SEQ ID NO: 5452 - DNA, 20 bp, Artificial Sequence
  Description of Artificial Sequence: Synthetic oligonucleotide
gctatgtgagattaaagtta

SEQ ID NO: 5453 - DNA, 20 bp, Artificial Sequence
  Description of Artificial Sequence: Synthetic oligonucleotide
tgctatgtgagattaaagtt

SEQ ID NO: 5454 - DNA, 20 bp, Artificial Sequence
  Description of Artificial Sequence: Synthetic oligonucleotide
ttgctatgtgagattaaagt

SEQ ID NO: 5455 - DNA, 20 bp, Artificial Sequence
  Description of Artificial Sequence: Synthetic oligonucleotide
attgctatgtgagattaaag

SEQ ID NO: 5456 - DNA, 20 bp, Artificial Sequence
  Description of Artificial Sequence: Synthetic oligonucleotide
gattgctatgtgagattaaa

SEQ ID NO: 5457 - DNA, 20 bp, Artificial Sequence
  Description of Artificial Sequence: Synthetic oligonucleotide
agattgctatgtgagattaa

SEQ ID NO: 5458 - DNA, 20 bp, Artificial Sequence
  Description of Artificial Sequence: Synthetic oligonucleotide
aagattgctatgtgagatta

SEQ ID NO: 5459 - DNA, 20 bp, Artificial Sequence
  Description of Artificial Sequence: Synthetic oligonucleotide
aaagattgctatgtgagatt

SEQ ID NO: 5460 - DNA, 20 bp, Artificial Sequence
  Description of Artificial Sequence: Synthetic oligonucleotide
taaagattgctatgtgagat

SEQ ID NO: 5461 - DNA, 20 bp, Artificial Sequence
  Description of Artificial Sequence: Synthetic oligonucleotide
ttaaagattgctatgtgaga

SEQ ID NO: 5462 - DNA, 20 bp, Artificial Sequence
  Description of Artificial Sequence: Synthetic oligonucleotide
attaaagattgctatgtgag

SEQ ID NO: 5463 - DNA, 20 bp, Artificial Sequence
  Description of Artificial Sequence: Synthetic oligonucleotide
gattaaagattgctatgtga

SEQ ID NO: 5464 - DNA, 20 bp, Artificial Sequence
  Description of Artificial Sequence: Synthetic oligonucleotide
tgattaaagattgctatgtg

SEQ ID NO: 5465 - DNA, 20 bp, Artificial Sequence
  Description of Artificial Sequence: Synthetic oligonucleotide
gtcctccctaatgttacaca

SEQ ID NO: 5466 - DNA, 20 bp, Artificial Sequence
  Description of Artificial Sequence: Synthetic oligonucleotide
agtcctccctaatgttacac

SEQ ID NO: 5467 - DNA, 20 bp, Artificial Sequence
  Description of Artificial Sequence: Synthetic oligonucleotide
aagtcctccctaatgttaca

SEQ ID NO: 5468 - DNA, 20 bp, Artificial Sequence
  Description of Artificial Sequence: Synthetic oligonucleotide
caagtcctccctaatgttac

SEQ ID NO: 5469 - DNA, 20 bp, Artificial Sequence
  Description of Artificial Sequence: Synthetic oligonucleotide
tcaagtcctccctaatgtta

SEQ ID NO: 5470 - DNA, 20 bp, Artificial Sequence
  Description of Artificial Sequence: Synthetic oligonucleotide
ttcaagtcctccctaatgtt

SEQ ID NO: 5471 - DNA, 20 bp, Artificial Sequence
  Description of Artificial Sequence: Synthetic oligonucleotide
tttcaagtcctccctaatgt

SEQ ID NO: 5472 - DNA, 20 bp, Artificial Sequence
  Description of Artificial Sequence: Synthetic oligonucleotide
ctttcaagtcctccctaatg

SEQ ID NO: 5473 - DNA, 20 bp, Artificial Sequence
  Description of Artificial Sequence: Synthetic oligonucleotide
tctttcaagtcctccctaat

SEQ ID NO: 5474 - DNA, 20 bp, Artificial Sequence
  Description of Artificial Sequence: Synthetic oligonucleotide
ctctttcaagtcctccctaa

SEQ ID NO: 5475 - DNA, 20 bp, Artificial Sequence
  Description of Artificial Sequence: Synthetic oligonucleotide
gctctttcaagtcctcccta

SEQ ID NO: 5476 - DNA, 20 bp, Artificial Sequence
  Description of Artificial Sequence: Synthetic oligonucleotide
ggctctttcaagtcctccct

SEQ ID NO: 5477 - DNA, 20 bp, Artificial Sequence
  Description of Artificial Sequence: Synthetic oligonucleotide
tggctctttcaagtcctccc

SEQ ID NO: 5478 - DNA, 20 bp, Artificial Sequence
  Description of Artificial Sequence: Synthetic oligonucleotide
gtggctctttcaagtcctcc

SEQ ID NO: 5479 - DNA, 20 bp, Artificial Sequence
  Description of Artificial Sequence: Synthetic oligonucleotide
ggtggctctttcaagtcctc

SEQ ID NO: 5480 - DNA, 20 bp, Artificial Sequence
  Description of Artificial Sequence: Synthetic oligonucleotide
tggtggctctttcaagtcct

SEQ ID NO: 5481 - DNA, 20 bp, Artificial Sequence
  Description of Artificial Sequence: Synthetic oligonucleotide
gtggtggctctttcaagtcc

SEQ ID NO: 5482 - DNA, 20 bp, Artificial Sequence
  Description of Artificial Sequence: Synthetic oligonucleotide
tgtggtggctctttcaagtc

SEQ ID NO: 5483 - DNA, 20 bp, Artificial Sequence
  Description of Artificial Sequence: Synthetic oligonucleotide
atgtggtggctctttcaagt

SEQ ID NO: 5484 - DNA, 20 bp, Artificial Sequence
  Description of Artificial Sequence: Synthetic oligonucleotide
aatgtggtggctctttcaag

SEQ ID NO: 5485 - DNA, 20 bp, Artificial Sequence
  Description of Artificial Sequence: Synthetic oligonucleotide
aaatgtggtggctctttcaa

SEQ ID NO: 5486 - DNA, 20 bp, Artificial Sequence
  Description of Artificial Sequence: Synthetic oligonucleotide
aaaatgtggtggctctttca

SEQ ID NO: 5487 - DNA, 20 bp, Artificial Sequence
  Description of Artificial Sequence: Synthetic oligonucleotide
gaaaatgtggtggctctttc

SEQ ID NO: 5488 - DNA, 20 bp, Artificial Sequence
  Description of Artificial Sequence: Synthetic oligonucleotide
tgaaaatgtggtggctcttt

SEQ ID NO: 5489 - DNA, 20 bp, Artificial Sequence
  Description of Artificial Sequence: Synthetic oligonucleotide
tcgtactccgcgtggcctcg

SEQ ID NO: 5490 - DNA, 20 bp, Artificial Sequence
  Description of Artificial Sequence: Synthetic oligonucleotide
atcgtactccgcgtggcctc

SEQ ID NO: 5491 - DNA, 20 bp, Artificial Sequence
  Description of Artificial Sequence: Synthetic oligonucleotide
gatcgtactccgcgtggcct

SEQ ID NO: 5492 - DNA, 20 bp, Artificial Sequence
  Description of Artificial Sequence: Synthetic oligonucleotide
cgatcgtactccgcgtggcc

SEQ ID NO: 5493 - DNA, 20 bp, Artificial Sequence
  Description of Artificial Sequence: Synthetic oligonucleotide
tcgatcgtactccgcgtggc

SEQ ID NO: 5494 - DNA, 20 bp, Artificial Sequence
  Description of Artificial Sequence: Synthetic oligonucleotide
ctcgatcgtactccgcgtgg

SEQ ID NO: 5495 - DNA, 20 bp, Artificial Sequence
  Description of Artificial Sequence: Synthetic oligonucleotide
aggcagctctccctagcatt

SEQ ID NO: 5496 - DNA, 20 bp, Artificial Sequence
  Description of Artificial Sequence: Synthetic oligonucleotide
taggcagctctccctagcat

SEQ ID NO: 5497 - DNA, 20 bp, Artificial Sequence
  Description of Artificial Sequence: Synthetic oligonucleotide
ataggcagctctccctagca

SEQ ID NO: 5498 - DNA, 20 bp, Artificial Sequence
  Description of Artificial Sequence: Synthetic oligonucleotide
tataggcagctctccctagc

SEQ ID NO: 5499 - DNA, 20 bp, Artificial Sequence
  Description of Artificial Sequence: Synthetic oligonucleotide
atataggcagctctccctag

SEQ ID NO: 5500 - DNA, 20 bp, Artificial Sequence
  Description of Artificial Sequence: Synthetic oligonucleotide
catataggcagctctcccta

SEQ ID NO: 5501 - DNA, 20 bp, Artificial Sequence
  Description of Artificial Sequence: Synthetic oligonucleotide
ccatataggcagctctccct

SEQ ID NO: 5502 - DNA, 20 bp, Artificial Sequence
  Description of Artificial Sequence: Synthetic oligonucleotide
tccatataggcagctctccc

SEQ ID NO: 5503 - DNA, 20 bp, Artificial Sequence
  Description of Artificial Sequence: Synthetic oligonucleotide
ttccatataggcagctctcc

SEQ ID NO: 5504 - DNA, 20 bp, Artificial Sequence
  Description of Artificial Sequence: Synthetic oligonucleotide
cttccatataggcagctctc

SEQ ID NO: 5505 - DNA, 20 bp, Artificial Sequence
  Description of Artificial Sequence: Synthetic oligonucleotide
tcttccatataggcagctct

SEQ ID NO: 5506 - DNA, 20 bp, Artificial Sequence
  Description of Artificial Sequence: Synthetic oligonucleotide
ctcttccatataggcagctc

SEQ ID NO: 5507 - DNA, 20 bp, Artificial Sequence
  Description of Artificial Sequence: Synthetic oligonucleotide
gctcttccatataggcagct

SEQ ID NO: 5508 - DNA, 20 bp, Artificial Sequence
  Description of Artificial Sequence: Synthetic oligonucleotide
ggctcttccatataggcagc

SEQ ID NO: 5509 - DNA, 20 bp, Artificial Sequence
  Description of Artificial Sequence: Synthetic oligonucleotide
gggctcttccatataggcag

SEQ ID NO: 5510 - DNA, 20 bp, Artificial Sequence
  Description of Artificial Sequence: Synthetic oligonucleotide
agggctcttccatataggca

SEQ ID NO: 5511 - DNA, 20 bp, Artificial Sequence
  Description of Artificial Sequence: Synthetic oligonucleotide
tagggctcttccatataggc

SEQ ID NO: 5512 - DNA, 20 bp, Artificial Sequence
  Description of Artificial Sequence: Synthetic oligonucleotide
ttagggctcttccatatagg

SEQ ID NO: 5513 - DNA, 20 bp, Artificial Sequence
  Description of Artificial Sequence: Synthetic oligonucleotide
attagggctcttccatatag

SEQ ID NO: 5514 - DNA, 20 bp, Artificial Sequence
  Description of Artificial Sequence: Synthetic oligonucleotide
cattagggctcttccatata

SEQ ID NO: 5515 - DNA, 20 bp, Artificial Sequence
  Description of Artificial Sequence: Synthetic oligonucleotide
acattagggctcttccatat

SEQ ID NO: 5516 - DNA, 20 bp, Artificial Sequence
  Description of Artificial Sequence: Synthetic oligonucleotide
cacattagggctcttccata

SEQ ID NO: 5517 - DNA, 20 bp, Artificial Sequence
  Description of Artificial Sequence: Synthetic oligonucleotide
acacattagggctcttccat

SEQ ID NO: 5518 - DNA, 20 bp, Artificial Sequence
  Description of Artificial Sequence: Synthetic oligonucleotide
tacacattagggctcttcca

SEQ ID NO: 5519 - DNA, 20 bp, Artificial Sequence
  Description of Artificial Sequence: Synthetic oligonucleotide
ttacacattagggctcttcc

SEQ ID NO: 5520 - DNA, 20 bp, Artificial Sequence
  Description of Artificial Sequence: Synthetic oligonucleotide
tttacacattagggctcttc

SEQ ID NO: 5521 - DNA, 20 bp, Artificial Sequence
  Description of Artificial Sequence: Synthetic oligonucleotide
ttttacacattagggctctt

SEQ ID NO: 5522 - DNA, 20 bp, Artificial Sequence
  Description of Artificial Sequence: Synthetic oligonucleotide
attttacacattagggctct

SEQ ID NO: 5523 - DNA, 20 bp, Artificial Sequence
  Description of Artificial Sequence: Synthetic oligonucleotide
aattttacacattagggctc

SEQ ID NO: 5524 - DNA, 20 bp, Artificial Sequence
  Description of Artificial Sequence: Synthetic oligonucleotide
taattttacacattagggct

SEQ ID NO: 5525 - DNA, 20 bp, Artificial Sequence
  Description of Artificial Sequence: Synthetic oligonucleotide
ttaattttacacattagggc

SEQ ID NO: 5526 - DNA, 20 bp, Artificial Sequence
  Description of Artificial Sequence: Synthetic oligonucleotide
attaattttacacattaggg

SEQ ID NO: 5527 - DNA, 20 bp, Artificial Sequence
  Description of Artificial Sequence: Synthetic oligonucleotide
aattaattttacacattagg

SEQ ID NO: 5528 - DNA, 20 bp, Artificial Sequence
  Description of Artificial Sequence: Synthetic oligonucleotide
aaattaattttacacattag

SEQ ID NO: 5529 - DNA, 20 bp, Artificial Sequence
  Description of Artificial Sequence: Synthetic oligonucleotide
aaaattaattttacacatta

SEQ ID NO: 5530 - DNA, 20 bp, Artificial Sequence
  Description of Artificial Sequence: Synthetic oligonucleotide
taaaattaattttacacatt

SEQ ID NO: 5531 - DNA, 20 bp, Artificial Sequence
  Description of Artificial Sequence: Synthetic oligonucleotide
ctaaaattaattttacacat

SEQ ID NO: 5532 - DNA, 20 bp, Artificial Sequence
  Description of Artificial Sequence: Synthetic oligonucleotide
actaaaattaattttacaca

SEQ ID NO: 5533 - DNA, 20 bp, Artificial Sequence
  Description of Artificial Sequence: Synthetic oligonucleotide
tactaaaattaattttacac

SEQ ID NO: 5534 - DNA, 20 bp, Artificial Sequence
  Description of Artificial Sequence: Synthetic oligonucleotide
ctactaaaattaattttaca

SEQ ID NO: 5535 - DNA, 29903 bp, Severe acute respiratory syndrome coronavirus 2
attaaaggtttataccttcccaggtaacaaaccaaccaactttcgatctcttgtagatctgttctctaaacgaactttaaaatctgtgtggctgtcactcggctgcatgcttagtgcactcacgcagtataattaataactaattactgtcgttgacaggacacgagtaactcgtctatcttctgcaggctgcttacggtttcgtccgtgttgcagccgatcatcagcacatctaggtttcgtccgggtgtgaccgaaaggtaagatggagagccttgtccctggtttcaacgagaaaacacacgtccaactcagtttgcctgttttacaggttcgcgacgtgctcgtacgtggctttggagactccgtggaggaggtcttatcagaggcacgtcaacatcttaaagatggcacttgtggcttagtagaagttgaaaaaggcgttttgcctcaacttgaacagccctatgtgttcatcaaacgttcggatgctcgaactgcacctcatggtcatgttatggttgagctggtagcagaactcgaaggcattcagtacggtcgtagtggtgagacacttggtgtccttgtccctcatgtgggcgaaataccagtggcttaccgcaaggttcttcttcgtaagaacggtaataaaggagctggtggccatagttacggcgccgatctaaagtcatttgacttaggcgacgagcttggcactgatccttatgaagattttcaagaaaactggaacactaaacatagcagtggtgttacccgtgaactcatgcgtgagcttaacggaggggcatacactcgctatgtcgataacaacttctgtggccctgatggctaccctcttgagtgcattaaagaccttctagcacgtgctggtaaagcttcatgcactttgtccgaacaactggactttattgacactaagaggggtgtatactgctgccgtgaacatgagcatgaaattgcttggtacacggaacgttctgaaaagagctatgaattgcagacaccttttgaaattaaattggcaaagaaatttgacaccttcaatggggaatgtccaaattttgtatttcccttaaattccataatcaagactattcaaccaagggttgaaaagaaaaagcttgatggctttatgggtagaattcgatctgtctatccagttgcgtcaccaaatgaatgcaaccaaatgtgcctttcaactctcatgaagtgtgatcattgtggtgaaacttcatggcagacgggcgattttgttaaagccacttgcgaattttgtggcactgagaatttgactaaagaaggtgccactacttgtggttacttaccccaaaatgctgttgttaaaatttattgtccagcatgtcacaattcagaagtaggacctgagcatagtcttgccgaataccataatgaatctggcttgaaaaccattcttcgtaagggtggtcgcactattgcctttggaggctgtgtgttctcttatgttggttgccataacaagtgtgcctattgggttccacgtgctagcgctaacataggttgtaaccatacaggtgttgttggagaaggttccgaaggtcttaatgacaaccttcttgaaatactccaaaaagagaaagtcaacatcaatattgttggtgactttaaacttaatgaagagatcgccattattttggcatctttttctgcttccacaagtgcttttgtggaaactgtgaaaggtttggattataaagcattcaaacaaattgttgaatcctgtggtaattttaaagttacaaaaggaaaagctaaaaaaggtgcctggaatattggtgaacagaaatcaatactgagtcctctttatgcatttgcatcagaggctgctcgtgttgtacgatcaattttctcccgcactcttgaaactgctcaaaattctgtgcgtgttttacagaaggccgctataacaatactagatggaatttcacagtattcactgagactcattgatgctatgatgttcacatctgatttggctactaacaatctagttgtaatggcctacattacaggtggtgttgttcagttgacttcgcagtggctaactaacatctttggcactgtttatgaaaaactcaaacccgtccttgattggcttgaagagaagtttaaggaaggtgtagagtttcttagagacggttgggaaattgttaaatttatctcaacctgtgcttgtgaaattgtcggtggacaaattgtcacctgtgcaaaggaaattaaggagagtgttcagacattctttaagcttgtaaataaatttttggctttgtgtgctgactctatcattattggtggagctaaacttaaagccttgaatttaggtgaaacatttgtcacgcactcaaagggattgtacagaaagtgtgttaaatccagagaagaaactggcctactcatgcctctaaaagccccaaaagaaattatcttcttagagggagaaacacttcccacagaagtgttaacagaggaagttgtcttgaaaactggtgatttacaaccattagaacaacctactagtgaagctgttgaagctccattggttggtacaccagtttgtattaacgggcttatgttgctcgaaatcaaagacacagaaaagtactgtgcccttgcacctaatatgatggtaacaaacaataccttcacactcaaaggcggtgcaccaacaaaggttacttttggtgatgacactgtgatagaagtgcaaggttacaagagtgtgaatatcacttttgaacttgatgaaaggattgataaagtacttaatgagaagtgctctgcctatacagttgaactcggtacagaagtaaatgagttcgcctgtgttgtggcagatgctgtcataaaaactttgcaaccagtatctgaattacttacaccactgggcattgatttagatgagtggagtatggctacatactacttatttgatgagtctggtgagtttaaattggcttcacatatgtattgttctttctaccctccagatgaggatgaagaagaaggtgattgtgaagaagaagagtttgagccatcaactcaatatgagtatggtactgaagatgattaccaaggtaaacctttggaatttggtgccacttctgctgctcttcaacctgaagaagagcaagaagaagattggttagatgatgatagtcaacaaactgttggtcaacaagacggcagtgaggacaatcagacaactactattcaaacaattgttgaggttcaacctcaattagagatggaacttacaccagttgttcagactattgaagtgaatagttttagtggttatttaaaacttactgacaatgtatacattaaaaatgcagacattgtggaagaagctaaaaaggtaaaaccaacagtggttgttaatgcagccaatgtttaccttaaacatggaggaggtgttgcaggagccttaaataaggctactaacaatgccatgcaagttgaatctgatgattacatagctactaatggaccacttaaagtgggtggtagttgtgttttaagcggacacaatcttgctaaacactgtcttcatgttgtcggcccaaatgttaacaaaggtgaagacattcaacttcttaagagtgcttatgaaaattttaatcagcacgaagttctacttgcaccattattatcagctggtatttttggtgctgaccctatacattctttaagagtttgtgtagatactgttcgcacaaatgtctacttagctgtctttgataaaaatctctatgacaaacttgtttcaagctttttggaaatgaagagtgaaaagcaagttgaacaaaagatcgctgagattcctaaagaggaagttaagccatttataactgaaagtaaaccttcagttgaacagagaaaacaagatgataagaaaatcaaagcttgtgttgaagaagttacaacaactctggaagaaactaagttcctcacagaaaacttgttactttatattgacattaatggcaatcttcatccagattctgccactcttgttagtgacattgacatcactttcttaaagaaagatgctccatatatagtgggtgatgttgttcaagagggtgttttaactgctgtggttatacctactaaaaaggctggtggcactactgaaatgctagcgaaagctttgagaaaagtgccaacagacaattatataaccacttacccgggtcagggtttaaatggttacactgtagaggaggcaaagacagtgcttaaaaagtgtaaaagtgccttttacattctaccatctattatctctaatgagaagcaagaaattcttggaactgtttcttggaatttgcgagaaatgcttgcacatgcagaagaaacacgcaaattaatgcctgtctgtgtggaaactaaagccatagtttcaactatacagcgtaaatataagggtattaaaatacaagagggtgtggttgattatggtgctagattttacttttacaccagtaaaacaactgtagcgtcacttatcaacacacttaacgatctaaatgaaactcttgttacaatgccacttggctatgtaacacatggcttaaatttggaagaagctgctcggtatatgagatctctcaaagtgccagctacagtttctgtttcttcacctgatgctgttacagcgtataatggttatcttacttcttcttctaaaacacctgaagaacattttattgaaaccatctcacttgctggttcctataaagattggtcctattctggacaatctacacaactaggtatagaatttcttaagagaggtgataaaagtgtatattacactagtaatcctaccacattccacctagatggtgaagttatcacctttgacaatcttaagacacttctttctttgagagaagtgaggactattaaggtgtttacaacagtagacaacattaacctccacacgcaagttgtggacatgtcaatgacatatggacaacagtttggtccaacttatttggatggagctgatgttactaaaataaaacctcataattcacatgaaggtaaaacattttatgttttacctaatgatgacactctacgtgttgaggcttttgagtactaccacacaactgatcctagttttctgggtaggtacatgtcagcattaaatcacactaaaaagtggaaatacccacaagttaatggtttaacttctattaaatgggcagataacaactgttatcttgccactgcattgttaacactccaacaaatagagttgaagtttaatccacctgctctacaagatgcttattacagagcaagggctggtgaagctgctaacttttgtgcacttatcttagcctactgtaataagacagtaggtgagttaggtgatgttagagaaacaatgagttacttgtttcaacatgccaatttagattcttgcaaaagagtcttgaacgtggtgtgtaaaacttgtggacaacagcagacaacccttaagggtgtagaagctgttatgtacatgggcacactttcttatgaacaatttaagaaaggtgttcagataccttgtacgtgtggtaaacaagctacaaaatatctagtacaacaggagtcaccttttgttatgatgtcagcaccacctgctcagtatgaacttaagcatggtacatttacttgtgctagtgagtacactggtaattaccagtgtggtcactataaacatataacttctaaagaaactttgtattgcatagacggtgctttacttacaaagtcctcagaatacaaaggtcctattacggatgttttctacaaagaaaacagttacacaacaaccataaaaccagttacttataaattggatggtgttgtttgtacagaaattgaccctaagttggacaattattataagaaagacaattcttatttcacagagcaaccaattgatcttgtaccaaaccaaccatatccaaacgcaagcttcgataattttaagtttgtatgtgataatatcaaatttgctgatgatttaaaccagttaactggttataagaaacctgcttcaagagagcttaaagttacatttttccctgacttaaatggtgatgtggtggctattgattataaacactacacaccctcttttaagaaaggagctaaattgttacataaacctattgtttggcatgttaacaatgcaactaataaagccacgtataaaccaaatacctggtgtatacgttgtctttggagcacaaaaccagttgaaacatcaaattcgtttgatgtactgaagtcagaggacgcgcagggaatggataatcttgcctgcgaagatctaaaaccagtctctgaagaagtagtggaaaatcctaccatacagaaagacgttcttgagtgtaatgtgaaaactaccgaagttgtaggagacattatacttaaaccagcaaataatagtttaaaaattacagaagaggttggccacacagatctaatggctgcttatgtagacaattctagtcttactattaagaaacctaatgaattatctagagtattaggtttgaaaacccttgctactcatggtttagctgctgttaatagtgtcccttgggatactatagctaattatgctaagccttttcttaacaaagttgttagtacaactactaacatagttacacggtgtttaaaccgtgtttgtactaattatatgccttatttctttactttattgctacaattgtgtacttttactagaagtacaaattctagaattaaagcatctatgccgactactatagcaaagaatactgttaagagtgtcggtaaattttgtctagaggcttcatttaattatttgaagtcacctaatttttctaaactgataaatattataatttggtttttactattaagtgtttgcctaggttctttaatctactcaaccgctgctttaggtgttttaatgtctaatttaggcatgccttcttactgtactggttacagagaaggctatttgaactctactaatgtcactattgcaacctactgtactggttctataccttgtagtgtttgtcttagtggtttagattctttagacacctatccttctttagaaactatacaaattaccatttcatcttttaaatgggatttaactgcttttggcttagttgcagagtggtttttggcatatattcttttcactaggtttttctatgtacttggattggctgcaatcatgcaattgtttttcagctattttgcagtacattttattagtaattcttggcttatgtggttaataattaatcttgtacaaatggccccgatttcagctatggttagaatgtacatcttctttgcatcattttattatgtatggaaaagttatgtgcatgttgtagacggttgtaattcatcaacttgtatgatgtgttacaaacgtaatagagcaacaagagtcgaatgtacaactattgttaatggtgttagaaggtccttttatgtctatgctaatggaggtaaaggcttttgcaaactacacaattggaattgtgttaattgtgatacattctgtgctggtagtacatttattagtgatgaagttgcgagagacttgtcactacagtttaaaagaccaataaatcctactgaccagtcttcttacatcgttgatagtgttacagtgaagaatggttccatccatctttactttgataaagctggtcaaaagacttatgaaagacattctctctctcattttgttaacttagacaacctgagagctaataacactaaaggttcattgcctattaatgttatagtttttgatggtaaatcaaaatgtgaagaatcatctgcaaaatcagcgtctgtttactacagtcagcttatgtgtcaacctatactgttactagatcaggcattagtgtctgatgttggtgatagtgcggaagttgcagttaaaatgtttgatgcttacgttaatacgttttcatcaacttttaacgtaccaatggaaaaactcaaaacactagttgcaactgcagaagctgaacttgcaaagaatgtgtccttagacaatgtcttatctacttttatttcagcagctcggcaagggtttgttgattcagatgtagaaactaaagatgttgttgaatgtcttaaattgtcacatcaatctgacatagaagttactggcgatagttgtaataactatatgctcacctataacaaagttgaaaacatgacaccccgtgaccttggtgcttgtattgactgtagtgcgcgtcatattaatgcgcaggtagcaaaaagtcacaacattgctttgatatggaacgttaaagatttcatgtcattgtctgaacaactacgaaaacaaatacgtagtgctgctaaaaagaataacttaccttttaagttgacatgtgcaactactagacaagttgttaatgttgtaacaacaaagatagcacttaagggtggtaaaattgttaataattggttgaagcagttaattaaagttacacttgtgttcctttttgttgctgctattttctatttaataacacctgttcatgtcatgtctaaacatactgacttttcaagtgaaatcataggatacaaggctattgatggtggtgtcactcgtgacatagcatctacagatacttgttttgctaacaaacatgctgattttgacacatggtttagccagcgtggtggtagttatactaatgacaaagcttgcccattgattgctgcagtcataacaagagaagtgggttttgtcgtgcctggtttgcctggcacgatattacgcacaactaatggtgactttttgcatttcttacctagagtttttagtgcagttggtaacatctgttacacaccatcaaaacttatagagtacactgactttgcaacatcagcttgtgttttggctgctgaatgtacaatttttaaagatgcttctggtaagccagtaccatattgttatgataccaatgtactagaaggttctgttgcttatgaaagtttacgccctgacacacgttatgtgctcatggatggctctattattcaatttcctaacacctaccttgaaggttctgttagagtggtaacaacttttgattctgagtactgtaggcacggcacttgtgaaagatcagaagctggtgtttgtgtatctactagtggtagatgggtacttaacaatgattattacagatctttaccaggagttttctgtggtgtagatgctgtaaatttacttactaatatgtttacaccactaattcaacctattggtgctttggacatatcagcatctatagtagctggtggtattgtagctatcgtagtaacatgccttgcctactattttatgaggtttagaagagcttttggtgaatacagtcatgtagttgcctttaatactttactattccttatgtcattcactgtactctgtttaacaccagtttactcattcttacctggtgtttattctgttatttacttgtacttgacattttatcttactaatgatgtttcttttttagcacatattcagtggatggttatgttcacacctttagtacctttctggataacaattgcttatatcatttgtatttccacaaagcatttctattggttctttagtaattacctaaagagacgtgtagtctttaatggtgtttcctttagtacttttgaagaagctgcgctgtgcacctttttgttaaataaagaaatgtatctaaagttgcgtagtgatgtgctattacctcttacgcaatataatagatacttagctctttataataagtacaagtattttagtggagcaatggatacaactagctacagagaagctgcttgttgtcatctcgcaaaggctctcaatgacttcagtaactcaggttctgatgttctttaccaaccaccacaaacctctatcacctcagctgttttgcagagtggttttagaaaaatggcattcccatctggtaaagttgagggttgtatggtacaagtaacttgtggtacaactacacttaacggtctttggcttgatgacgtagtttactgtccaagacatgtgatctgcacctctgaagacatgcttaaccctaattatgaagatttactcattcgtaagtctaatcataatttcttggtacaggctggtaatgttcaactcagggttattggacattctatgcaaaattgtgtacttaagcttaaggttgatacagccaatcctaagacacctaagtataagtttgttcgcattcaaccaggacagactttttcagtgttagcttgttacaatggttcaccatctggtgtttaccaatgtgctatgaggcccaatttcactattaagggttcattccttaatggttcatgtggtagtgttggttttaacatagattatgactgtgtctctttttgttacatgcaccatatggaattaccaactggagttcatgctggcacagacttagaaggtaacttttatggaccttttgttgacaggcaaacagcacaagcagctggtacggacacaactattacagttaatgttttagcttggttgtacgctgctgttataaatggagacaggtggtttctcaatcgatttaccacaactcttaatgactttaaccttgtggctatgaagtacaattatgaacctctaacacaagaccatgttgacatactaggacctctttctgctcaaactggaattgccgttttagatatgtgtgcttcattaaaagaattactgcaaaatggtatgaatggacgtaccatattgggtagtgctttattagaagatgaatttacaccttttgatgttgttagacaatgctcaggtgttactttccaaagtgcagtgaaaagaacaatcaagggtacacaccactggttgttactcacaattttgacttcacttttagttttagtccagagtactcaatggtctttgttcttttttttgtatgaaaatgcctttttaccttttgctatgggtattattgctatgtctgcttttgcaatgatgtttgtcaaacataagcatgcatttctctgtttgtttttgttaccttctcttgccactgtagcttattttaatatggtctatatgcctgctagttgggtgatgcgtattatgacatggttggatatggttgatactagtttgtctggttttaagctaaaagactgtgttatgtatgcatcagctgtagtgttactaatccttatgacagcaagaactgtgtatgatgatggtgctaggagagtgtggacacttatgaatgtcttgacactcgtttataaagtttattatggtaatgctttagatcaagccatttccatgtgggctcttataatctctgttacttctaactactcaggtgtagttacaactgtcatgtttttggccagaggtattgtttttatgtgtgttgagtattgccctattttcttcataactggtaatacacttcagtgtataatgctagtttattgtttcttaggctatttttgtacttgttactttggcctcttttgtttactcaaccgctactttagactgactcttggtgtttatgattacttagtttctacacaggagtttagatatatgaattcacagggactactcccacccaagaatagcatagatgccttcaaactcaacattaaattgttgggtgttggtggcaaaccttgtatcaaagtagccactgtacagtctaaaatgtcagatgtaaagtgcacatcagtagtcttactctcagttttgcaacaactcagagtagaatcatcatctaaattgtgggctcaatgtgtccagttacacaatgacattctcttagctaaagatactactgaagcctttgaaaaaatggtttcactactttctgttttgctttccatgcagggtgctgtagacataaacaagctttgtgaagaaatgctggacaacagggcaaccttacaagctatagcctcagagtttagttcccttccatcatatgcagcttttgctactgctcaagaagcttatgagcaggctgttgctaatggtgattctgaagttgttcttaaaaagttgaagaagtctttgaatgtggctaaatctgaatttgaccgtgatgcagccatgcaacgtaagttggaaaagatggctgatcaagctatgacccaaatgtataaacaggctagatctgaggacaagagggcaaaagttactagtgctatgcagacaatgcttttcactatgcttagaaagttggataatgatgcactcaacaacattatcaacaatgcaagagatggttgtgttcccttgaacataatacctcttacaacagcagccaaactaatggttgtcataccagactataacacatataaaaatacgtgtgatggtacaacatttacttatgcatcagcattgtgggaaatccaacaggttgtagatgcagatagtaaaattgttcaacttagtgaaattagtatggacaattcacctaatttagcatggcctcttattgtaacagctttaagggccaattctgctgtcaaattacagaataatgagcttagtcctgttgcactacgacagatgtcttgtgctgccggtactacacaaactgcttgcactgatgacaatgcgttagcttactacaacacaacaaagggaggtaggtttgtacttgcactgttatccgatttacaggatttgaaatgggctagattccctaagagtgatggaactggtactatctatacagaactggaaccaccttgtaggtttgttacagacacacctaaaggtcctaaagtgaagtatttatactttattaaaggattaaacaacctaaatagaggtatggtacttggtagtttagctgccacagtacgtctacaagctggtaatgcaacagaagtgcctgccaattcaactgtattatctttctgtgcttttgctgtagatgctgctaaagcttacaaagattatctagctagtgggggacaaccaatcactaattgtgttaagatgttgtgtacacacactggtactggtcaggcaataacagttacaccggaagccaatatggatcaagaatcctttggtggtgcatcgtgttgtctgtactgccgttgccacatagatcatccaaatcctaaaggattttgtgacttaaaaggtaagtatgtacaaatacctacaacttgtgctaatgaccctgtgggttttacacttaaaaacacagtctgtaccgtctgcggtatgtggaaaggttatggctgtagttgtgatcaactccgcgaacccatgcttcagtcagctgatgcacaatcgtttttaaacgggtttgcggtgtaagtgcagcccgtcttacaccgtgcggcacaggcactagtactgatgtcgtatacagggcttttgacatctacaatgataaagtagctggttttgctaaattcctaaaaactaattgttgtcgcttccaagaaaaggacgaagatgacaatttaattgattcttactttgtagttaagagacacactttctctaactaccaacatgaagaaacaatttataatttacttaaggattgtccagctgttgctaaacatgacttctttaagtttagaatagacggtgacatggtaccacatatatcacgtcaacgtcttactaaatacacaatggcagacctcgtctatgctttaaggcattttgatgaaggtaattgtgacacattaaaagaaatacttgtcacatacaattgttgtgatgatgattatttcaataaaaaggactggtatgattttgtagaaaacccagatatattacgcgtatacgccaacttaggtgaacgtgtacgccaagctttgttaaaaacagtacaattctgtgatgccatgcgaaatgctggtattgttggtgtactgacattagataatcaagatctcaatggtaactggtatgatttcggtgatttcatacaaaccacgccaggtagtggagttcctgttgtagattcttattattcattgttaatgcctatattaaccttgaccagggctttaactgcagagtcacatgttgacactgacttaacaaagccttacattaagtgggatttgttaaaatatgacttcacggaagagaggttaaaactctttgaccgttattttaaatattgggatcagacataccacccaaattgtgttaactgtttggatgacagatgcattctgcattgtgcaaactttaatgttttattctctacagtgttcccacctacaagttttggaccactagtgagaaaaatatttgttgatggtgttccatttgtagtttcaactggataccacttcagagagctaggtgttgtacataatcaggatgtaaacttacatagctctagacttagttttaaggaattacttgtgtatgctgctgaccctgctatgcacgctgcttctggtaatctattactagataaacgcactacgtgcttttcagtagctgcacttactaacaatgttgcttttcaaactgtcaaacccggtaattttaacaaagacttctatgactttgctgtgtctaagggtttctttaaggaaggaagttctgttgaattaaaacacttcttctttgctcaggatggtaatgctgctatcagcgattatgactactatcgttataatctaccaacaatgtgtgatatcagacaactactatttgtagttgaagttgttgataagtactttgattgttacgatggtggctgtattaatgctaaccaagtcatcgtcaacaacctagacaaatcagctggttttccatttaataaatggggtaaggctagactttattatgattcaatgagttatgaggatcaagatgcacttttcgcatatacaaaacgtaatgtcatccctactataactcaaatgaatcttaagtatgccattagtgcaaagaatagagctcgcaccgtagctggtgtctctatctgtagtactatgaccaatagacagtttcatcaaaaattattgaaatcaatagccgccactagaggagctactgtagtaattggaacaagcaaattctatggtggttggcacaacatgttaaaaactgtttatagtgatgtagaaaaccctcaccttatgggttgggattatcctaaatgtgatagagccatgcctaacatgcttagaattatggcctcacttgttcttgctcgcaaacatacaacgtgttgtagcttgtcacaccgtttctatagattagctaatgagtgtgctcaagtattgagtgaaatggtcatgtgtggcggttcactatatgttaaaccaggtggaacctcatcaggagatgccacaactgcttatgctaatagtgtttttaacatttgtcaagctgtcacggccaatgttaatgcacttttatctactgatggtaacaaaattgccgataagtatgtccgcaatttacaacacagactttatgagtgtctctatagaaatagagatgttgacacagactttgtgaatgagttttacgcatatttgcgtaaacatttctcaatgatgatactctctgacgatgctgttgtgtgtttcaatagcacttatgcatctcaaggtctagtggctagcataaagaactttaagtcagttctttattatcaaaacaatgtttttatgtctgaagcaaaatgttggactgagactgaccttactaaaggacctcatgaattttgctctcaacatacaatgctagttaaacagggtgatgattatgtgtaccttccttacccagatccatcaagaatcctaggggccggctgttttgtagatgatatcgtaaaaacagatggtacacttatgattgaacggttcgtgtctttagctatagatgcttacccacttactaaacatcctaatcaggagtatgctgatgtctttcatttgtacttacaatacataagaaagctacatgatgagttaacaggacacatgttagacatgtattctgttatgcttactaatgataacacttcaaggtattgggaacctgagttttatgaggctatgtacacaccgcatacagtcttacaggctgttggggcttgtgttctttgcaattcacagacttcattaagatgtggtgcttgcatacgtagaccattcttatgttgtaaatgctgttacgaccatgtcatatcaacatcacataaattagtcttgtctgttaatccgtatgtttgcaatgctccaggttgtgatgtcacagatgtgactcaactttacttaggaggtatgagctattattgtaaatcacataaaccacccattagttttccattgtgtgctaatggacaagtttttggtttatataaaaatacatgtgttggtagcgataatgttactgactttaatgcaattgcaacatgtgactggacaaatgctggtgattacattttagctaacacctgtactgaaagactcaagctttttgcagcagaaacgctcaaagctactgaggagacatttaaactgtcttatggtattgctactgtacgtgaagtgctgtctgacagagaattacatctttcatgggaagttggtaaacctagaccaccacttaaccgaaattatgtctttactggttatcgtgtaactaaaaacagtaaagtacaaataggagagtacacctttgaaaaaggtgactatggtgatgctgttgtttaccgaggtacaacaacttacaaattaaatgttggtgattattttgtgctgacatcacatacagtaatgccattaagtgcacctacactagtgccacaagagcactatgttagaattactggcttatacccaacactcaatatctcagatgagttttctagcaatgttgcaaattatcaaaaggttggtatgcaaaagtattctacactccagggaccacctggtactggtaagagtcattttgctattggcctagctctctactacccttctgctcgcatagtgtatacagcttgctctcatgccgctgttgatgcactatgtgagaaggcattaaaatatttgcctatagataaatgtagtagaattatacctgcacgtgctcgtgtagagtgttttgataaattcaaagtgaattcaacattagaacagtatgtcttttgtactgtaaatgcattgcctgagacgacagcagatatagttgtctttgatgaaatttcaatggccacaaattatgatttgagtgttgtcaatgccagattacgtgctaagcactatgtgtacattggcgaccctgctcaattacctgcaccacgcacattgctaactaagggcacactagaaccagaatatttcaattcagtgtgtagacttatgaaaactataggtccagacatgttcctcggaacttgtcggcgttgtcctgctgaaattgttgacactgtgagtgctttggtttatgataataagcttaaagcacataaagacaaatcagctcaatgctttaaaatgttttataagggtgttatcacgcatgatgtttcatctgcaattaacaggccacaaataggcgtggtaagagaattccttacacgtaaccctgcttggagaaaagctgtctttatttcaccttataattcacagaatgctgtagcctcaaagattttgggactaccaactcaaactgttgattcatcacagggctcagaatatgactatgtcatattcactcaaaccactgaaacagctcactcttgtaatgtaaacagatttaatgttgctattaccagagcaaaagtaggcatactttgcataatgtctgatagagacctttatgacaagttgcaatttacaagtcttgaaattccacgtaggaatgtggcaactttacaagctgaaaatgtaacaggactctttaaagattgtagtaaggtaatcactgggttacatcctacacaggcacctacacacctcagtgttgacactaaattcaaaactgaaggtttatgtgttgacatacctggcatacctaaggacatgacctatagaagactcatctctatgatgggttttaaaatgaattatcaagttaatggttaccctaacatgtttatcacccgcgaagaagctataagacatgtacgtgcatggattggcttcgatgtcgaggggtgtcatgctactagagaagctgttggtaccaatttacctttacagctaggtttttctacaggtgttaacctagttgctgtacctacaggttatgttgatacacctaataatacagatttttccagagttagtgctaaaccaccgcctggagatcaatttaaacacctcataccacttatgtacaaaggacttccttggaatgtagtgcgtataaagattgtacaaatgttaagtgacacacttaaaaatctctctgacagagtcgtatttgtcttatgggcacatggctttgagttgacatctatgaagtattttgtgaaaataggacctgagcgcacctgttgtctatgtgatagacgtgccacatgcttttccactgcttcagacacttatgcctgttggcatcattctattggatttgattacgtctataatccgtttatgattgatgttcaacaatggggttttacaggtaacctacaaagcaaccatgatctgtattgtcaagtccatggtaatgcacatgtagctagttgtgatgcaatcatgactaggtgtctagctgtccacgagtgctttgttaagcgtgttgactggactattgaatatcctataattggtgatgaactgaagattaatgcggcttgtagaaaggttcaacacatggttgttaaagctgcattattagcagacaaattcccagttcttcacgacattggtaaccctaaagctattaagtgtgtacctcaagctgatgtagaatggaagttctatgatgcacagccttgtagtgacaaagcttataaaatagaagaattattctattcttatgccacacattctgacaaattcacagatggtgtatgcctattttggaattgcaatgtcgatagatatcctgctaattccattgtttgtagatttgacactagagtgctatctaaccttaacttgcctggttgtgatggtggcagtttgtatgtaaataaacatgcattccacacaccagcttttgataaaagtgcttttgttaatttaaaacaattaccatttttctattactctgacagtccatgtgagtctcatggaaaacaagtagtgtcagatatagattatgtaccactaaagtctgctacgtgtataacacgttgcaatttaggtggtgctgtctgtagacatcatgctaatgagtacagattgtatctcgatgcttataacatgatgatctcagctggctttagcttgtgggtttacaaacaatttgatacttataacctctggaacacttttacaagacttcagagtttagaaaatgtggcttttaatgttgtaaataagggacactttgatggacaacagggtgaagtaccagtttctatcattaataacactgtttacacaaaagttgatggtgttgatgtagaattgtttgaaaataaaacaacattacctgttaatgtagcatttgagctttgggctaagcgcaacattaaaccagtaccagaggtgaaaatactcaataatttgggtgtggacattgctgctaatactgtgatctgggactacaaaagagatgctccagcacatatatctactattggtgtttgttctatgactgacatagccaagaaaccaactgaaacgatttgtgcaccactcactgtcttttttgatggtagagttgatggtcaagtagacttatttagaaatgcccgtaatggtgttcttattacagaaggtagtgttaaaggtttacaaccatctgtaggtcccaaacaagctagtcttaatggagtcacattaattggagaagccgtaaaaacacagttcaattattataagaaagttgatggtgttgtccaacaattacctgaaacttactttactcagagtagaaatttacaagaatttaaacccaggagtcaaatggaaattgatttcttagaattagctatggatgaattcattgaacggtataaattagaaggctatgccttcgaacatatcgtttatggagattttagtcatagtcagttaggtggtttacatctactgattggactagctaaacgttttaaggaatcaccttttgaattagaagattttattcctatggacagtacagttaaaaactatttcataacagatgcgcaaacaggttcatctaagtgtgtgtgttctgttattgatttattacttgatgattttgttgaaataataaaatcccaagatttatctgtagtttctaaggttgtcaaagtgactattgactatacagaaatttcatttatgctttggtgtaaagatggccatgtagaaacattttacccaaaattacaatctagtcaagcgtggcaaccgggtgttgctatgcctaatctttacaaaatgcaaagaatgctattagaaaagtgtgaccttcaaaattatggtgatagtgcaacattacctaaaggcataatgatgaatgtcgcaaaatatactcaactgtgtcaatatttaaacacattaacattagctgtaccctataatatgagagttatacattttggtgctggttctgataaaggagttgcaccaggtacagctgttttaagacagtggttgcctacgggtacgctgcttgtcgattcagatcttaatgactttgtctctgatgcagattcaactttgattggtgattgtgcaactgtacatacagctaataaatgggatctcattattagtgatatgtacgaccctaagactaaaaatgttacaaaagaaaatgactctaaagagggttttttcacttacatttgtgggtttatacaacaaaagctagctcttggaggttccgtggctataaagataacagaacattcttggaatgctgatctttataagctcatgggacacttcgcatggtggacagcctttgttactaatgtgaatgcgtcatcatctgaagcatttttaattggatgtaattatcttggcaaaccacgcgaacaaatagatggttatgtcatgcatgcaaattacatattttggaggaatacaaatccaattcagttgtcttcctattctttatttgacatgagtaaatttccccttaaattaaggggtactgctgttatgtctttaaaagaaggtcaaatcaatgatatgattttatctcttcttagtaaaggtagacttataattagagaaaacaacagagttgttatttctagtgatgttcttgttaacaactaaacgaacaatgtttgtttttcttgttttattgccactagtctctagtcagtgtgttaatcttacaaccagaactcaattaccccctgcatacactaattctttcacacgtggtgtttattaccctgacaaagttttcagatcctcagttttacattcaactcaggacttgttcttacctttcttttccaatgttacttggttccatgctatacatgtctctgggaccaatggtactaagaggtttgataaccctgtcctaccatttaatgatggtgtttattttgcttccactgagaagtctaacataataagaggctggatttttggtactactttagattcgaagacccagtccctacttattgttaataacgctactaatgttgttattaaagtctgtgaatttcaattttgtaatgatccatttttgggtgtttattaccacaaaaacaacaaaagttggatggaaagtgagttcagagtttattctagtgcgaataattgcacttttgaatatgtctctcagccttttcttatggaccttgaaggaaaacagggtaatttcaaaaatcttagggaatttgtgtttaagaatattgatggttattttaaaatatattctaagcacacgcctattaatttagtgcgtgatctccctcagggtttttcggctttagaaccattggtagatttgccaataggtattaacatcactaggtttcaaactttacttgctttacatagaagttatttgactcctggtgattcttcttcaggttggacagctggtgctgcagcttattatgtgggttatcttcaacctaggacttttctattaaaatataatgaaaatggaaccattacagatgctgtagactgtgcacttgaccctctctcagaaacaaagtgtacgttgaaatccttcactgtagaaaaaggaatctatcaaacttctaactttagagtccaaccaacagaatctattgttagatttcctaatattacaaacttgtgcccttttggtgaagtttttaacgccaccagatttgcatctgtttatgcttggaacaggaagagaatcagcaactgtgttgctgattattctgtcctatataattccgcatcattttccacttttaagtgttatggagtgtctcctactaaattaaatgatctctgctttactaatgtctatgcagattcatttgtaattagaggtgatgaagtcagacaaatcgctccagggcaaactggaaagattgctgattataattataaattaccagatgattttacaggctgcgttatagcttggaattctaacaatcttgattctaaggttggtggtaattataattacctgtatagattgtttaggaagtctaatctcaaaccttttgagagagatatttcaactgaaatctatcaggccggtagcacaccttgtaatggtgttgaaggttttaattgttactttcctttacaatcatatggtttccaacccactaatggtgttggttaccaaccatacagagtagtagtactttcttttgaacttctacatgcaccagcaactgtttgtggacctaaaaagtctactaatttggttaaaaacaaatgtgtcaatttcaacttcaatggtttaacaggcacaggtgttcttactgagtctaacaaaaagtttctgcctttccaacaatttggcagagacattgctgacactactgatgctgtccgtgatccacagacacttgagattcttgacattacaccatgttcttttggtggtgtcagtgttataacaccaggaacaaatacttctaaccaggttgctgttctttatcaggatgttaactgcacagaagtccctgttgctattcatgcagatcaacttactcctacttggcgtgtttattctacaggttctaatgtttttcaaacacgtgcaggctgtttaataggggctgaacatgtcaacaactcatatgagtgtgacatacccattggtgcaggtatatgcgctagttatcagactcagactaattctcctcggcgggcacgtagtgtagctagtcaatccatcattgcctacactatgtcacttggtgcagaaaattcagttgcttactctaataactctattgccatacccacaaattttactattagtgttaccacagaaattctaccagtgtctatgaccaagacatcagtagattgtacaatgtacatttgtggtgattcaactgaatgcagcaatcttttgttgcaatatggcagtttttgtacacaattaaaccgtgctttaactggaatagctgttgaacaagacaaaaacacccaagaagtttttgcacaagtcaaacaaatttacaaaacaccaccaattaaagattttggtggttttaatttttcacaaatattaccagatccatcaaaaccaagcaagaggtcatttattgaagatctacttttcaacaaagtgacacttgcagatgctggcttcatcaaacaatatggtgattgccttggtgatattgctgctagagacctcatttgtgcacaaaagtttaacggccttactgttttgccacctttgctcacagatgaaatgattgctcaatacacttctgcactgttagcgggtacaatcacttctggttggacctttggtgcaggtgctgcattacaaataccatttgctatgcaaatggcttataggtttaatggtattggagttacacagaatgttctctatgagaaccaaaaattgattgccaaccaatttaatagtgctattggcaaaattcaagactcactttcttccacagcaagtgcacttggaaaacttcaagatgtggtcaaccaaaatgcacaagctttaaacacgcttgttaaacaacttagctccaattttggtgcaatttcaagtgttttaaatgatatcctttcacgtcttgacaaagttgaggctgaagtgcaaattgataggttgatcacaggcagacttcaaagtttgcagacatatgtgactcaacaattaattagagctgcagaaatcagagcttctgctaatcttgctgctactaaaatgtcagagtgtgtacttggacaatcaaaaagagttgatttttgtggaaagggctatcatcttatgtccttccctcagtcagcacctcatggtgtagtcttcttgcatgtgacttatgtccctgcacaagaaaagaacttcacaactgctcctgccatttgtcatgatggaaaagcacactttcctcgtgaaggtgtctttgtttcaaatggcacacactggtttgtaacacaaaggaatttttatgaaccacaaatcattactacagacaacacatttgtgtctggtaactgtgatgttgtaataggaattgtcaacaacacagtttatgatcctttgcaacctgaattagactcattcaaggaggagttagataaatattttaagaatcatacatcaccagatgttgatttaggtgacatctctggcattaatgcttcagttgtaaacattcaaaaagaaattgaccgcctcaatgaggttgccaagaatttaaatgaatctctcatcgatctccaagaacttggaaagtatgagcagtatataaaatggccatggtacatttggctaggttttatagctggcttgattgccatagtaatggtgacaattatgctttgctgtatgaccagttgctgtagttgtctcaagggctgttgttcttgtggatcctgctgcaaatttgatgaagacgactctgagccagtgctcaaaggagtcaaattacattacacataaacgaacttatggatttgtttatgagaatcttcacaattggaactgtaactttgaagcaaggtgaaatcaaggatgctactccttcagattttgttcgcgctactgcaacgataccgatacaagcctcactccctttcggatggcttattgttggcgttgcacttcttgctgtttttcagagcgcttccaaaatcataaccctcaaaaagagatggcaactagcactctccaagggtgttcactttgtttgcaacttgctgttgttgtttgtaacagtttactcacaccttttgctcgttgctgctggccttgaagccccttttctctatctttatgctttagtctacttcttgcagagtataaactttgtaagaataataatgaggctttggctttgctggaaatgccgttccaaaaacccattactttatgatgccaactattttctttgctggcatactaattgttacgactattgtataccttacaatagtgtaacttcttcaattgtcattacttcaggtgatggcacaacaagtcctatttctgaacatgactaccagattggtggttatactgaaaaatgggaatctggagtaaaagactgtgttgtattacacagttacttcacttcagactattaccagctgtactcaactcaattgagtacagacactggtgttgaacatgttaccttcttcatctacaataaaattgttgatgagcctgaagaacatgtccaaattcacacaatcgacggttcatccggagttgttaatccagtaatggaaccaatttatgatgaaccgacgacgactactagcgtgcctttgtaagcacaagctgatgagtacgaacttatgtactcattcgtttcggaagagacaggtacgttaatagttaatagcgtacttctttttcttgctttcgtggtattcttgctagttacactagccatccttactgcgcttcgattgtgtgcgtactgctgcaatattgttaacgtgagtcttgtaaaaccttctttttacgtttactctcgtgttaaaaatctgaattcttctagagttcctgatcttctggtctaaacgaactaaatattatattagtttttctgtttggaactttaattttagccatggcagattccaacggtactattaccgttgaagagcttaaaaagctccttgaacaatggaacctagtaataggtttcctattccttacatggatttgtcttctacaatttgcctatgccaacaggaataggtttttgtatataattaagttaattttcctctggctgttatggccagtaactttagcttgttttgtgcttgctgctgtttacagaataaattggatcaccggtggaattgctatcgcaatggcttgtcttgtaggcttgatgtggctcagctacttcattgcttctttcagactgtttgcgcgtacgcgttccatgtggtcattcaatccagaaactaacattcttctcaacgtgccactccatggcactattctgaccagaccgcttctagaaagtgaactcgtaatcggagctgtgatccttcgtggacatcttcgtattgctggacaccatctaggacgctgtgacatcaaggacctgcctaaagaaatcactgttgctacatcacgaacgctttcttattacaaattgggagcttcgcagcgtgtagcaggtgactcaggttttgctgcatacagtcgctacaggattggcaactataaattaaacacagaccattccagtagcagtgacaatattgctttgcttgtacagtaagtgacaacagatgtttcatctcgttgactttcaggttactatagcagagatattactaattattatgaggacttttaaagtttccatttggaatcttgattacatcataaacctcataattaaaaatttatctaagtcactaactgagaataaatattctcaattagatgaagagcaaccaatggagattgattaaacgaacatgaaaattattcttttcttggcactgataacactcgctacttgtgagctttatcactaccaagagtgtgttagaggtacaacagtacttttaaaagaaccttgctcttctggaacatacgagggcaattcaccatttcatcctctagctgataacaaatttgcactgacttgctttagcactcaatttgcttttgcttgtcctgacggcgtaaaacacgtctatcagttacgtgccagatcagtttcacctaaactgttcatcagacaagaggaagttcaagaactttactctccaatttttcttattgttgcggcaatagtgtttataacactttgcttcacactcaaaagaaagacagaatgattgaactttcattaattgacttctatttgtgctttttagcctttctgctattccttgttttaattatgcttattatcttttggttctcacttgaactgcaagatcataatgaaacttgtcacgcctaaacgaacatgaaatttcttgttttcttaggaatcatcacaactgtagctgcatttcaccaagaatgtagtttacagtcatgtactcaacatcaaccatatgtagttgatgacccgtgtcctattcacttctattctaaatggtatattagagtaggagctagaaaatcagcacctttaattgaattgtgcgtggatgaggctggttctaaatcacccattcagtacatcgatatcggtaattatacagtttcctgtttaccttttacaattaattgccaggaacctaaattgggtagtcttgtagtgcgttgttcgttctatgaagactttttagagtatcatgacgttcgtgttgttttagatttcatctaaacgaacaaactaaaatgtctgataatggaccccaaaatcagcgaaatgcaccccgcattacgtttggtggaccctcagattcaactggcagtaaccagaatggagaacgcagtggggcgcgatcaaaacaacgtcggccccaaggtttacccaataatactgcgtcttggttcaccgctctcactcaacatggcaaggaagaccttaaattccctcgaggacaaggcgttccaattaacaccaatagcagtccagatgaccaaattggctactaccgaagagctaccagacgaattcgtggtggtgacggtaaaatgaaagatctcagtccaagatggtatttctactacctaggaactgggccagaagctggacttccctatggtgctaacaaagacggcatcatatgggttgcaactgagggagccttgaatacaccaaaagatcacattggcacccgcaatcctgctaacaatgctgcaatcgtgctacaacttcctcaaggaacaacattgccaaaaggcttctacgcagaagggagcagaggcggcagtcaagcctcttctcgttcctcatcacgtagtcgcaacagttcaagaaattcaactccaggcagcagtaggggaacttctcctgctagaatggctggcaatggcggtgatgctgctcttgctttgctgctgcttgacagattgaaccagcttgagagcaaaatgtctggtaaaggccaacaacaacaaggccaaactgtcactaagaaatctgctgctgaggcttctaagaagcctcggcaaaaacgtactgccactaaagcatacaatgtaacacaagctttcggcagacgtggtccagaacaaacccaaggaaattttggggaccaggaactaatcagacaaggaactgattacaaacattggccgcaaattgcacaatttgcccccagcgcttcagcgttcttcggaatgtcgcgcattggcatggaagtcacaccttcgggaacgtggttgacctacacaggtgccatcaaattggatgacaaagatccaaatttcaaagatcaagtcattttgctgaataagcatattgacgcatacaaaacattcccaccaacagagcctaaaaaggacaaaaagaagaaggctgatgaaactcaagccttaccgcagagacagaagaaacagcaaactgtgactcttcttcctgctgcagatttggatgatttctccaaacaattgcaacaatccatgagcagtgctgactcaactcaggcctaaactcatgcagaccacacaaggcagatgggctatataaacgttttcgcttttccgtttacgatatatagtctactcttgtgcagaatgaattctcgtaactacatagcacaagtagatgtagttaactttaatctcacatagcaatctttaatcagtgtgtaacattagggaggacttgaaagagccaccacattttcaccgaggccacgcggagtacgatcgagtgtacagtgaacaatgctagggagagctgcctatatggaagagccctaatgtgtaaaattaattttagtagtgctatccccatgtgattttaatagcttcttaggagaatgacaaaaaaaaaaaaaaaaaaaaaaaaaaaaaaaaa

SEQ ID NO: 5536 - DNA, 29751 bp, Severe acute respiratory syndrome-related coronavirus
atattaggtttttacctacccaggaaaagccaaccaacctcgatctcttgtagatctgttctctaaacgaactttaaaatctgtgtagctgtcgctcggctgcatgcctagtgcacctacgcagtataaacaataataaattttactgtcgttgacaagaaacgagtaactcgtccctcttctgcagactgcttacggtttcgtccgtgttgcagtcgatcatcagcatacctaggtttcgtccgggtgtgaccgaaaggtaagatggagagccttgttcttggtgtcaacgagaaaacacacgtccaactcagtttgcctgtccttcaggttagagacgtgctagtgcgtggcttcggggactctgtggaagaggccctatcggaggcacgtgaacacctcaaaaatggcacttgtggtctagtagagctggaaaaaggcgtactgccccagcttgaacagccctatgtgttcattaaacgttctgatgccttaagcaccaatcacggccacaaggtcgttgagctggttgcagaaatggacggcattcagtacggtcgtagcggtataacactgggagtactcgtgccacatgtgggcgaaaccccaattgcataccgcaatgttcttcttcgtaagaacggtaataagggagccggtggtcatagctatggcatcgatctaaagtcttatgacttaggtgacgagcttggcactgatcccattgaagattatgaacaaaactggaacactaagcatggcagtggtgcactccgtgaactcactcgtgagctcaatggaggtgcagtcactcgctatgtcgacaacaatttctgtggcccagatgggtaccctcttgattgcatcaaagattttctcgcacgcgcgggcaagtcaatgtgcactctttccgaacaacttgattacatcgagtcgaagagaggtgtctactgctgccgtgaccatgagcatgaaattgcctggttcactgagcgctctgataagagctacgagcaccagacacccttcgaaattaagagtgccaagaaatttgacactttcaaaggggaatgcccaaagtttgtgtttcctcttaactcaaaagtcaaagtcattcaaccacgtgttgaaaagaaaaagactgagggtttcatggggcgtatacgctctgtgtaccctgttgcatctccacaggagtgtaacaatatgcacttgtctaccttgatgaaatgtaatcattgcgatgaagtttcatggcagacgtgcgactttctgaaagccacttgtgaacattgtggcactgaaaatttagttattgaaggacctactacatgtgggtacctacctactaatgctgtagtgaaaatgccatgtcctgcctgtcaagacccagagattggacctgagcatagtgttgcagattatcacaaccactcaaacattgaaactcgactccgcaagggaggtaggactagatgttttggaggctgtgtgtttgcctatgttggctgctataataagcgtgcctactgggttcctcgtgctagtgctgatattggctcaggccatactggcattactggtgacaatgtggagaccttgaatgaggatctccttgagatactgagtcgtgaacgtgttaacattaacattgttggcgattttcatttgaatgaagaggttgccatcattttggcatctttctctgcttctacaagtgcctttattgacactataaagagtcttgattacaagtctttcaaaaccattgttgagtcctgcggtaactataaagttaccaagggaaagcccgtaaaaggtgcttggaacattggacaacagagatcagttttaacaccactgtgtggttttccctcacaggctgctggtgttatcagatcaatttttgcgcgcacacttgatgcagcaaaccactcaattcctgatttgcaaagagcagctgtcaccatacttgatggtatttctgaacagtcattacgtcttgtcgacgccatggtttatacttcagacctgctcaccaacagtgtcattattatggcatatgtaactggtggtcttgtacaacagacttctcagtggttgtctaatcttttgggcactactgttgaaaaactcaggcctatctttgaatggattgaggcgaaacttagtgcaggagttgaatttctcaaggatgcttgggagattctcaaatttctcattacaggtgtttttgacatcgtcaagggtcaaatacaggttgcttcagataacatcaaggattgtgtaaaatgcttcattgatgttgttaacaaggcactcgaaatgtgcattgatcaagtcactatcgctggcgcaaagttgcgatcactcaacttaggtgaagtcttcatcgctcaaagcaagggactttaccgtcagtgtatacgtggcaaggagcagctgcaactactcatgcctcttaaggcaccaaaagaagtaacctttcttgaaggtgattcacatgacacagtacttacctctgaggaggttgttctcaagaacggtgaactcgaagcactcgagacgcccgttgatagcttcacaaatggagctatcgttggcacaccagtctgtgtaaatggcctcatgctcttagagattaaggacaaagaacaatactgcgcattgtctcctggtttactggctacaaacaatgtctttcgcttaaaagggggtgcaccaattaaaggtgtaacctttggagaagatactgtttgggaagttcaaggttacaagaatgtgagaatcacatttgagcttgatgaacgtgttgacaaagtgcttaatgaaaagtgctctgtctacactgttgaatccggtaccgaagttactgagtttgcatgtgttgtagcagaggctgttgtgaagactttacaaccagtttctgatctccttaccaacatgggtattgatcttgatgagtggagtgtagctacattctacttatttgatgatgctggtgaagaaaacttttcatcacgtatgtattgttccttttaccctccagatgaggaagaagaggacgatgcagagtgtgaggaagaagaaattgatgaaacctgtgaacatgagtacggtacagaggatgattatcaaggtctccctctggaatttggtgcctcagctgaaacagttcgagttgaggaagaagaagaggaagactggctggatgatactactgagcaatcagagattgagccagaaccagaacctacacctgaagaaccagttaatcagtttactggttatttaaaacttactgacaatgttgccattaaatgtgttgacatcgttaaggaggcacaaagtgctaatcctatggtgattgtaaatgctgctaacatacacctgaaacatggtggtggtgtagcaggtgcactcaacaaggcaaccaatggtgccatgcaaaaggagagtgatgattacattaagctaaatggccctcttacagtaggagggtcttgtttgctttctggacataatcttgctaagaagtgtctgcatgttgttggacctaacctaaatgcaggtgaggacatccagcttcttaaggcagcatatgaaaatttcaattcacaggacatcttacttgcaccattgttgtcagcaggcatatttggtgctaaaccacttcagtctttacaagtgtgcgtgcagacggttcgtacacaggtttatattgcagtcaatgacaaagctctttatgagcaggttgtcatggattatcttgataacctgaagcctagagtggaagcacctaaacaagaggagccaccaaacacagaagattccaaaactgaggagaaatctgtcgtacagaagcctgtcgatgtgaagccaaaaattaaggcctgcattgatgaggttaccacaacactggaagaaactaagtttcttaccaataagttactcttgtttgctgatatcaatggtaagctttaccatgattctcagaacatgcttagaggtgaagatatgtctttccttgagaaggatgcaccttacatggtaggtgatgttatcactagtggtgatatcacttgtgttgtaataccctccaaaaaggctggtggcactactgagatgctctcaagagctttgaagaaagtgccagttgatgagtatataaccacgtaccctggacaaggatgtgctggttatacacttgaggaagctaagactgctcttaagaaatgcaaatctgcattttatgtactaccttcagaagcacctaatgctaaggaagagattctaggaactgtatcctggaatttgagagaaatgcttgctcatgctgaagagacaagaaaattaatgcctatatgcatggatgttagagccataatggcaaccatccaacgtaagtataaaggaattaaaattcaagagggcatcgttgactatggtgtccgattcttcttttatactagtaaagagcctgtagcttctattattacgaagctgaactctctaaatgagccgcttgtcacaatgccaattggttatgtgacacatggttttaatcttgaagaggctgcgcgctgtatgcgttctcttaaagctcctgccgtagtgtcagtatcatcaccagatgctgttactacatataatggatacctcacttcgtcatcaaagacatctgaggagcactttgtagaaacagtttctttggctggctcttacagagattggtcctattcaggacagcgtacagagttaggtgttgaatttcttaagcgtggtgacaaaattgtgtaccacactctggagagccccgtcgagtttcatcttgacggtgaggttctttcacttgacaaactaaagagtctcttatccctgcgggaggttaagactataaaagtgttcacaactgtggacaacactaatctccacacacagcttgtggatatgtctatgacatatggacagcagtttggtccaacatacttggatggtgctgatgttacaaaaattaaacctcatgtaaatcatgagggtaagactttctttgtactacctagtgatgacacactacgtagtgaagctttcgagtactaccatactcttgatgagagttttcttggtaggtacatgtctgctttaaaccacacaaagaaatggaaatttcctcaagttggtggtttaacttcaattaaatgggctgataacaattgttatttgtctagtgttttattagcacttcaacagcttgaagtcaaattcaatgcaccagcacttcaagaggcttattatagagcccgtgctggtgatgctgctaacttttgtgcactcatactcgcttacagtaataaaactgttggcgagcttggtgatgtcagagaaactatgacccatcttctacagcatgctaatttggaatctgcaaagcgagttcttaatgtggtgtgtaaacattgtggtcagaaaactactaccttaacgggtgtagaagctgtgatgtatatgggtactctatcttatgataatcttaagacaggtgtttccattccatgtgtgtgtggtcgtgatgctacacaatatctagtacaacaagagtcttcttttgttatgatgtctgcaccacctgctgagtataaattacagcaaggtacattcttatgtgcgaatgagtacactggtaactatcagtgtggtcattacactcatataactgctaaggagaccctctatcgtattgacggagctcaccttacaaagatgtcagagtacaaaggaccagtgactgatgttttctacaaggaaacatcttacactacaaccatcaagcctgtgtcgtataaactcgatggagttacttacacagagattgaaccaaaattggatgggtattataaaaaggataatgcttactatacagagcagcctatagaccttgtaccaactcaaccattaccaaatgcgagttttgataatttcaaactcacatgttctaacacaaaatttgctgatgatttaaatcaaatgacaggcttcacaaagccagcttcacgagagctatctgtcacattcttcccagacttgaatggcgatgtagtggctattgactatagacactattcagcgagtttcaagaaaggtgctaaattactgcataagccaattgtttggcacattaaccaggctacaaccaagacaacgttcaaaccaaacacttggtgtttacgttgtctttggagtacaaagccagtagatacttcaaattcatttgaagttctggcagtagaagacacacaaggaatggacaatcttgcttgtgaaagtcaacaacccacctctgaagaagtagtggaaaatcctaccatacagaaggaagtcatagagtgtgacgtgaaaactaccgaagttgtaggcaatgtcatacttaaaccatcagatgaaggtgttaaagtaacacaagagttaggtcatgaggatcttatggctgcttatgtggaaaacacaagcattaccattaagaaacctaatgagctttcactagccttaggtttaaaaacaattgccactcatggtattgctgcaattaatagtgttccttggagtaaaattttggcttatgtcaaaccattcttaggacaagcagcaattacaacatcaaattgcgctaagagattagcacaacgtgtgtttaacaattatatgccttatgtgtttacattattgttccaattgtgtacttttactaaaagtaccaattctagaattagagcttcactacctacaactattgctaaaaatagtgttaagagtgttgctaaattatgtttggatgccggcattaattatgtgaagtcacccaaattttctaaattgttcacaatcgctatgtggctattgttgttaagtatttgcttaggttctctaatctgtgtaactgctgcttttggtgtactcttatctaattttggtgctccttcttattgtaatggcgttagagaattgtatcttaattcgtctaacgttactactatggatttctgtgaaggttcttttccttgcagcatttgtttaagtggattagactcccttgattcttatccagctcttgaaaccattcaggtgacgatttcatcgtacaagctagacttgacaattttaggtctggccgctgagtgggttttggcatatatgttgttcacaaaattcttttatttattaggtctttcagctataatgcaggtgttctttggctattttgctagtcatttcatcagcaattcttggctcatgtggtttatcattagtattgtacaaatggcacccgtttctgcaatggttaggatgtacatcttctttgcttctttctactacatatggaagagctatgttcatatcatggatggttgcacctcttcgacttgcatgatgtgctataagcgcaatcgtgccacacgcgttgagtgtacaactattgttaatggcatgaagagatctttctatgtctatgcaaatggaggccgtggcttctgcaagactcacaattggaattgtctcaattgtgacacattttgcactggtagtacattcattagtgatgaagttgctcgtgatttgtcactccagtttaaaagaccaatcaaccctactgaccagtcatcgtatattgttgatagtgttgctgtgaaaaatggcgcgcttcacctctactttgacaaggctggtcaaaagacctatgagagacatccgctctcccattttgtcaatttagacaatttgagagctaacaacactaaaggttcactgcctattaatgtcatagtttttgatggcaagtccaaatgcgacgagtctgcttctaagtctgcttctgtgtactacagtcagctgatgtgccaacctattctgttgcttgaccaagctcttgtatcagacgttggagatagtactgaagtttccgttaagatgtttgatgcttatgtcgacaccttttcagcaacttttagtgttcctatggaaaaacttaaggcacttgttgctacagctcacagcgagttagcaaagggtgtagctttagatggtgtcctttctacattcgtgtcagctgcccgacaaggtgttgttgataccgatgttgacacaaaggatgttattgaatgtctcaaactttcacatcactctgacttagaagtgacaggtgacagttgtaacaatttcatgctcacctataataaggttgaaaacatgacgcccagagatcttggcgcatgtattgactgtaatgcaaggcatatcaatgcccaagtagcaaaaagtcacaatgtttcactcatctggaatgtaaaagactacatgtctttatctgaacagctgcgtaaacaaattcgtagtgctgccaagaagaacaacataccttttagactaacttgtgctacaactagacaggttgtcaatgtcataactactaaaatctcactcaagggtggtaagattgttagtacttgttttaaacttatgcttaaggccacattattgtgcgttcttgctgcattggtttgttatatcgttatgccagtacatacattgtcaatccatgatggttacacaaatgaaatcattggttacaaagccattcaggatggtgtcactcgtgacatcatttctactgatgattgttttgcaaataaacatgctggttttgacgcatggtttagccagcgtggtggttcatacaaaaatgacaaaagctgccctgtagtagctgctatcattacaagagagattggtttcatagtgcctggcttaccgggtactgtgctgagagcaatcaatggtgacttcttgcattttctacctcgtgtttttagtgctgttggcaacatttgctacacaccttccaaactcattgagtatagtgattttgctacctctgcttgcgttcttgctgctgagtgtacaatttttaaggatgctatgggcaaacctgtgccatattgttatgacactaatttgctagagggttctatttcttatagtgagcttcgtccagacactcgttatgtgcttatggatggttccatcatacagtttcctaacacttacctggagggttctgttagagtagtaacaacttttgatgctgagtactgtagacatggtacatgcgaaaggtcagaagtaggtatttgcctatctaccagtggtagatgggttcttaataatgagcattacagagctctatcaggagttttctgtggtgttgatgcgatgaatctcatagctaacatctttactcctcttgtgcaacctgtgggtgctttagatgtgtctgcttcagtagtggctggtggtattattgccatattggtgacttgtgctgcctactactttatgaaattcagacgtgtttttggtgagtacaaccatgttgttgctgctaatgcacttttgtttttgatgtctttcactatactctgtctggtaccagcttacagctttctgccgggagtctactcagtcttttacttgtacttgacattctatttcaccaatgatgtttcattcttggctcaccttcaatggtttgccatgttttctcctattgtgcctttttggataacagcaatctatgtattctgtatttctctgaagcactgccattggttctttaacaactatcttaggaaaagagtcatgtttaatggagttacatttagtaccttcgaggaggctgctttgtgtacctttttgctcaacaaggaaatgtacctaaaattgcgtagcgagacactgttgccacttacacagtataacaggtatcttgctctatataacaagtacaagtatttcagtggagccttagatactaccagctatcgtgaagcagcttgctgccacttagcaaaggctctaaatgactttagcaactcaggtgctgatgttctctaccaaccaccacagacatcaatcacttctgctgttctgcagagtggttttaggaaaatggcattcccgtcaggcaaagttgaagggtgcatggtacaagtaacctgtggaactacaactcttaatggattgtggttggatgacacagtatactgtccaagacatgtcatttgcacagcagaagacatgcttaatcctaactatgaagatctgctcattcgcaaatccaaccatagctttcttgttcaggctggcaatgttcaacttcgtgttattggccattctatgcaaaattgtctgcttaggcttaaagttgatacttctaaccctaagacacccaagtataaatttgtccgtatccaacctggtcaaacattttcagttctagcatgctacaatggttcaccatctggtgtttatcagtgtgccatgagacctaatcataccattaaaggttctttccttaatggatcatgtggtagtgttggttttaacattgattatgattgcgtgtctttctgctatatgcatcatatggagcttccaacaggagtacacgctggtactgacttagaaggtaaattctatggtccatttgttgacagacaaactgcacaggctgcaggtacagacacaaccataacattaaatgttttggcatggctgtatgctgctgttatcaatggtgataggtggtttcttaatagattcaccactactttgaatgactttaaccttgtggcaatgaagtacaactatgaacctttgacacaagatcatgttgacatattgggacctctttctgctcaaacaggaattgccgtcttagatatgtgtgctgctttgaaagagctgctgcagaatggtatgaatggtcgtactatccttggtagcactattttagaagatgagtttacaccatttgatgttgttagacaatgctctggtgttaccttccaaggtaagttcaagaaaattgttaagggcactcatcattggatgcttttaactttcttgacatcactattgattcttgttcaaagtacacagtggtcactgtttttctttgtttacgagaatgctttcttgccatttactcttggtattatggcaattgctgcatgtgctatgctgcttgttaagcataagcacgcattcttgtgcttgtttctgttaccttctcttgcaacagttgcttactttaatatggtctacatgcctgctagctgggtgatgcgtatcatgacatggcttgaattggctgacactagcttgtctggttataggcttaaggattgtgttatgtatgcttcagctttagttttgcttattctcatgacagctcgcactgtttatgatgatgctgctagacgtgtttggacactgatgaatgtcattacacttgtttacaaagtctactatggtaatgctttagatcaagctatttccatgtgggccttagttatttctgtaacctctaactattctggtgtcgttacgactatcatgtttttagctagagctatagtgtttgtgtgtgttgagtattacccattgttatttattactggcaacaccttacagtgtatcatgcttgtttattgtttcttaggctattgttgctgctgctactttggccttttctgtttactcaaccgttacttcaggcttactcttggtgtttatgactacttggtctctacacaagaatttaggtatatgaactcccaggggcttttgcctcctaagagtagtattgatgctttcaagcttaacattaagttgttgggtattggaggtaaaccatgtatcaaggttgctactgtacagtctaaaatgtctgacgtaaagtgcacatctgtggtactgctctcggttcttcaacaacttagagtagagtcatcttctaaattgtgggcacaatgtgtacaactccacaatgatattcttcttgcaaaagacacaactgaagctttcgagaagatggtttctcttttgtctgttttgctatccatgcagggtgctgtagacattaataggttgtgcgaggaaatgctcgataaccgtgctactcttcaggctattgcttcagaatttagttctttaccatcatatgccgcttatgccactgcccaggaggcctatgagcaggctgtagctaatggtgattctgaagtcgttctcaaaaagttaaagaaatctttgaatgtggctaaatctgagtttgaccgtgatgctgccatgcaacgcaagttggaaaagatggcagatcaggctatgacccaaatgtacaaacaggcaagatctgaggacaagagggcaaaagtaactagtgctatgcaaacaatgctcttcactatgcttaggaagcttgataatgatgcacttaacaacattatcaacaatgcgcgtgatggttgtgttccactcaacatcataccattgactacagcagccaaactcatggttgttgtccctgattatggtacctacaagaacacttgtgatggtaacacctttacatatgcatctgcactctgggaaatccagcaagttgttgatgcggatagcaagattgttcaacttagtgaaattaacatggacaattcaccaaatttggcttggcctcttattgttacagctctaagagccaactcagctgttaaactacagaataatgaactgagtccagtagcactacgacagatgtcctgtgcggctggtaccacacaaacagcttgtactgatgacaatgcacttgcctactataacaattcgaagggaggtaggtttgtgctggcattactatcagaccaccaagatctcaaatgggctagattccctaagagtgatggtacaggtacaatttacacagaactggaaccaccttgtaggtttgttacagacacaccaaaagggcctaaagtgaaatacttgtacttcatcaaaggcttaaacaacctaaatagaggtatggtgctgggcagtttagctgctacagtacgtcttcaggctggaaatgctacagaagtacctgccaattcaactgtgctttccttctgtgcttttgcagtagaccctgctaaagcatataaggattacctagcaagtggaggacaaccaatcaccaactgtgtgaagatgttgtgtacacacactggtacaggacaggcaattactgtaacaccagaagctaacatggaccaagagtcctttggtggtgcttcatgttgtctgtattgtagatgccacattgaccatccaaatcctaaaggattctgtgacttgaaaggtaagtacgtccaaatacctaccacttgtgctaatgacccagtgggttttacacttagaaacacagtctgtaccgtctgcggaatgtggaaaggttatggctgtagttgtgaccaactccgcgaacccttgatgcagtctgcggatgcatcaacgtttttaaacgggtttgcggtgtaagtgcagcccgtcttacaccgtgcggcacaggcactagtactgatgtcgtctacagggcttttgatatttacaacgaaaaagttgctggttttgcaaagttcctaaaaactaattgctgtcgcttccaggagaaggatgaggaaggcaatttattagactcttactttgtagttaagaggcatactatgtctaactaccaacatgaagagactatttataacttggttaaagattgtccagcggttgctgtccatgactttttcaagtttagagtagatggtgacatggtaccacatatatcacgtcagcgtctaactaaatacacaatggctgatttagtctatgctctacgtcattttgatgagggtaattgtgatacattaaaagaaatactcgtcacatacaattgctgtgatgatgattatttcaataagaaggattggtatgacttcgtagagaatcctgacatcttacgcgtatatgctaacttaggtgagcgtgtacgccaatcattattaaagactgtacaattctgcgatgctatgcgtgatgcaggcattgtaggcgtactgacattagataatcaggatcttaatgggaactggtacgatttcggtgatttcgtacaagtagcaccaggctgcggagttcctattgtggattcatattactcattgctgatgcccatcctcactttgactagggcattggctgctgagtcccatatggatgctgatctcgcaaaaccacttattaagtgggatttgctgaaatatgattttacggaagagagactttgtctcttcgaccgttattttaaatattgggaccagacataccatcccaattgtattaactgtttggatgataggtgtatccttcattgtgcaaactttaatgtgttattttctactgtgtttccacctacaagttttggaccactagtaagaaaaatatttgtagatggtgttccttttgttgtttcaactggataccattttcgtgagttaggagtcgtacataatcaggatgtaaacttacatagctcgcgtctcagtttcaaggaacttttagtgtatgctgctgatccagctatgcatgcagcttctggcaatttattgctagataaacgcactacatgcttttcagtagctgcactaacaaacaatgttgcttttcaaactgtcaaacccggtaattttaataaagacttttatgactttgctgtgtctaaaggtttctttaaggaaggaagttctgttgaactaaaacacttcttctttgctcaggatggcaacgctgctatcagtgattatgactattatcgttataatctgccaacaatgtgtgatatcagacaactcctattcgtagttgaagttgttgataaatactttgattgttacgatggtggctgtattaatgccaaccaagtaatcgttaacaatctggataaatcagctggtttcccatttaataaatggggtaaggctagactttattatgactcaatgagttatgaggatcaagatgcacttttcgcgtatactaagcgtaatgtcatccctactataactcaaatgaatcttaagtatgccattagtgcaaagaatagagctcgcaccgtagctggtgtctctatctgtagtactatgacaaatagacagtttcatcagaaattattgaagtcaatagccgccactagaggagctactgtggtaattggaacaagcaagttttacggtggctggcataatatgttaaaaactgtttacagtgatgtagaaactccacaccttatgggttgggattatccaaaatgtgacagagccatgcctaacatgcttaggataatggcctctcttgttcttgctcgcaaacataacacttgctgtaacttatcacaccgtttctacaggttagctaacgagtgtgcgcaagtattaagtgagatggtcatgtgtggcggctcactatatgttaaaccaggtggaacatcatccggtgatgctacaactgcttatgctaatagtgtctttaacatttgtcaagctgttacagccaatgtaaatgcacttctttcaactgatggtaataagatagctgacaagtatgtccgcaatctacaacacaggctctatgagtgtctctatagaaatagggatgttgatcatgaattcgtggatgagttttacgcttacctgcgtaaacatttctccatgatgattctttctgatgatgccgttgtgtgctataacagtaactatgcggctcaaggtttagtagctagcattaagaactttaaggcagttctttattatcaaaataatgtgttcatgtctgaggcaaaatgttggactgagactgaccttactaaaggacctcacgaattttgctcacagcatacaatgctagttaaacaaggagatgattacgtgtacctgccttacccagatccatcaagaatattaggcgcaggctgttttgtcgatgatattgtcaaaacagatggtacacttatgattgaaaggttcgtgtcactggctattgatgcttacccacttacaaaacatcctaatcaggagtatgctgatgtctttcacttgtatttacaatacattagaaagttacatgatgagcttactggccacatgttggacatgtattccgtaatgctaactaatgataacacctcacggtactgggaacctgagttttatgaggctatgtacacaccacatacagtcttgcaggctgtaggtgcttgtgtattgtgcaattcacagacttcacttcgttgcggtgcctgtattaggagaccattcctatgttgcaagtgctgctatgaccatgtcatttcaacatcacacaaattagtgttgtctgttaatccctatgtttgcaatgccccaggttgtgatgtcactgatgtgacacaactgtatctaggaggtatgagctattattgcaagtcacataagcctcccattagttttccattatgtgctaatggtcaggtttttggtttatacaaaaacacatgtgtaggcagtgacaatgtcactgacttcaatgcgatagcaacatgtgattggactaatgctggcgattacatacttgccaacacttgtactgagagactcaagcttttcgcagcagaaacgctcaaagccactgaggaaacatttaagctgtcatatggtattgccactgtacgcgaagtactctctgacagagaattgcatctttcatgggaggttggaaaacctagaccaccattgaacagaaactatgtctttactggttaccgtgtaactaaaaatagtaaagtacagattggagagtacacctttgaaaaaggtgactatggtgatgctgttgtgtacagaggtactacgacatacaagttgaatgttggtgattactttgtgttgacatctcacactgtaatgccacttagtgcacctactctagtgccacaagagcactatgtgagaattactggcttgtacccaacactcaacatctcagatgagttttctagcaatgttgcaaattatcaaaaggtcggcatgcaaaagtactctacactccaaggaccacctggtactggtaagagtcattttgccatcggacttgctctctattacccatctgctcgcatagtgtatacggcatgctctcatgcagctgttgatgccctatgtgaaaaggcattaaaatatttgcccatagataaatgtagtagaatcatacctgcgcgtgcgcgcgtagagtgttttgataaattcaaagtgaattcaacactagaacagtatgttttctgcactgtaaatgcattgccagaaacaactgctgacattgtagtctttgatgaaatctctatggctactaattatgacttgagtgttgtcaatgctagacttcgtgcaaaacactacgtctatattggcgatcctgctcaattaccagccccccgcacattgctgactaaaggcacactagaaccagaatattttaattcagtgtgcagacttatgaaaacaataggtccagacatgttccttggaacttgtcgccgttgtcctgctgaaattgttgacactgtgagtgctttagtttatgacaataagctaaaagcacacaaggataagtcagctcaatgcttcaaaatgttctacaaaggtgttattacacatgatgtttcatctgcaatcaacagacctcaaataggcgttgtaagagaatttcttacacgcaatcctgcttggagaaaagctgtttttatctcaccttataattcacagaacgctgtagcttcaaaaatcttaggattgcctacgcagactgttgattcatcacagggttctgaatatgactatgtcatattcacacaaactactgaaacagcacactcttgtaatgtcaaccgcttcaatgtggctatcacaagggcaaaaattggcattttgtgcataatgtctgatagagatctttatgacaaactgcaatttacaagtctagaaataccacgtcgcaatgtggctacattacaagcagaaaatgtaactggactttttaaggactgtagtaagatcattactggtcttcatcctacacaggcacctacacacctcagcgttgatataaagttcaagactgaaggattatgtgttgacataccaggcataccaaaggacatgacctaccgtagactcatctctatgatgggtttcaaaatgaattaccaagtcaatggttaccctaatatgtttatcacccgcgaagaagctattcgtcacgttcgtgcgtggattggctttgatgtagagggctgtcatgcaactagagatgctgtgggtactaacctacctctccagctaggattttctacaggtgttaacttagtagctgtaccgactggttatgttgacactgaaaataacacagaattcaccagagttaatgcaaaacctccaccaggtgaccagtttaaacatcttataccactcatgtataaaggcttgccctggaatgtagtgcgtattaagatagtacaaatgctcagtgatacactgaaaggattgtcagacagagtcgtgttcgtcctttgggcgcatggctttgagcttacatcaatgaagtactttgtcaagattggacctgaaagaacgtgttgtctgtgtgacaaacgtgcaacttgcttttctacttcatcagatacttatgcctgctggaatcattctgtgggttttgactatgtctataacccatttatgattgatgttcagcagtggggctttacgggtaaccttcagagtaaccatgaccaacattgccaggtacatggaaatgcacatgtggctagttgtgatgctatcatgactagatgtttagcagtccatgagtgctttgttaagcgcgttgattggtctgttgaataccctattataggagatgaactgagggttaattctgcttgcagaaaagtacaacacatggttgtgaagtctgcattgcttgctgataagtttccagttcttcatgacattggaaatccaaaggctatcaagtgtgtgcctcaggctgaagtagaatggaagttctacgatgctcagccatgtagtgacaaagcttacaaaatagaggaactcttctattcttatgctacacatcacgataaattcactgatggtgtttgtttgttttggaattgtaacgttgatcgttacccagccaatgcaattgtgtgtaggtttgacacaagagtcttgtcaaacttgaacttaccaggctgtgatggtggtagtttgtatgtgaataagcatgcattccacactccagctttcgataaaagtgcatttactaatttaaagcaattgcctttcttttactattctgatagtccttgtgagtctcatggcaaacaagtagtgtcggatattgattatgttccactcaaatctgctacgtgtattacacgatgcaatttaggtggtgctgtttgcagacaccatgcaaatgagtaccgacagtacttggatgcatataatatgatgatttctgctggatttagcctatggatttacaaacaatttgatacttataacctgtggaatacatttaccaggttacagagtttagaaaatgtggcttataatgttgttaataaaggacactttgatggacacgccggcgaagcacctgtttccatcattaataatgctgtttacacaaaggtagatggtattgatgtggagatctttgaaaataagacaacacttcctgttaatgttgcatttgagctttgggctaagcgtaacattaaaccagtgccagagattaagatactcaataatttgggtgttgatatcgctgctaatactgtaatctgggactacaaaagagaagccccagcacatgtatctacaataggtgtctgcacaatgactgacattgccaagaaacctactgagagtgcttgttcttcacttactgtcttgtttgatggtagagtggaaggacaggtagacctttttagaaacgcccgtaatggtgttttaataacagaaggttcagtcaaaggtctaacaccttcaaagggaccagcacaagctagcgtcaatggagtcacattaattggagaatcagtaaaaacacagtttaactactttaagaaagtagacggcattattcaacagttgcctgaaacctactttactcagagcagagacttagaggattttaagcccagatcacaaatggaaactgactttctcgagctcgctatggatgaattcatacagcgatataagctcgagggctatgccttcgaacacatcgtttatggagatttcagtcatggacaacttggcggtcttcatttaatgataggcttagccaagcgctcacaagattcaccacttaaattagaggattttatccctatggacagcacagtgaaaaattacttcataacagatgcgcaaacaggttcatcaaaatgtgtgtgttctgtgattgatcttttacttgatgactttgtcgagataataaagtcacaagatttgtcagtgatttcaaaagtggtcaaggttacaattgactatgctgaaatttcattcatgctttggtgtaaggatggacatgttgaaaccttctacccaaaactacaagcaagtcaagcgtggcaaccaggtgttgcgatgcctaacttgtacaagatgcaaagaatgcttcttgaaaagtgtgaccttcagaattatggtgaaaatgctgttataccaaaaggaataatgatgaatgtcgcaaagtatactcaactgtgtcaatacttaaatacacttactttagctgtaccctacaacatgagagttattcactttggtgctggctctgataaaggagttgcaccaggtacagctgtgctcagacaatggttgccaactggcacactacttgtcgattcagatcttaatgacttcgtctccgacgcagattctactttaattggagactgtgcaacagtacatacggctaataaatgggaccttattattagcgatatgtatgaccctaggaccaaacatgtgacaaaagagaatgactctaaagaagggtttttcacttatctgtgtggatttataaagcaaaaactagccctgggtggttctatagctgtaaagataacagagcattcttggaatgctgacctttacaagcttatgggccatttctcatggtggacagcttttgttacaaatgtaaatgcatcatcatcggaagcatttttaattggggctaactatcttggcaagccgaaggaacaaattgatggctataccatgcatgctaactacattttctggaggaacacaaatcctatccagttgtcttcctattcactctttgacatgagcaaatttcctcttaaattaagaggaactgctgtaatgtctcttaaggagaatcaaatcaatgatatgatttattctcttctggaaaaaggtaggcttatcattagagaaaacaacagagttgtggtttcaagtgatattcttgttaacaactaaacgaacatgtttattttcttattatttcttactctcactagtggtagtgaccttgaccggtgcaccacttttgatgatgttcaagctcctaattacactcaacatacttcatctatgaggggggtttactatcctgatgaaatttttagatcagacactctttatttaactcaggatttatttcttccattttattctaatgttacagggtttcatactattaatcatacgtttggcaaccctgtcataccttttaaggatggtatttattttgctgccacagagaaatcaaatgttgtccgtggttgggtttttggttctaccatgaacaacaagtcacagtcggtgattattattaacaattctactaatgttgttatacgagcatgtaactttgaattgtgtgacaaccctttctttgctgtttctaaacccatgggtacacagacacatactatgatattcgataatgcatttaattgcactttcgagtacatatctgatgccttttcgcttgatgtttcagaaaagtcaggtaattttaaacacttacgagagtttgtgtttaaaaataaagatgggtttctctatgtttataagggctatcaacctatagatgtagttcgtgatctaccttctggttttaacactttgaaacctatttttaagttgcctcttggtattaacattacaaattttagagccattcttacagccttttcacctgctcaagacatttggggcacgtcagctgcagcctattttgttggctatttaaagccaactacatttatgctcaagtatgatgaaaatggtacaatcacagatgctgttgattgttctcaaaatccacttgctgaactcaaatgctctgttaagagctttgagattgacaaaggaatttaccagacctctaatttcagggttgttccctcaggagatgttgtgagattccctaatattacaaacttgtgtccttttggagaggtttttaatgctactaaattcccttctgtctatgcatgggagagaaaaaaaatttctaattgtgttgctgattactctgtgctctacaactcaacatttttttcaacctttaagtgctatggcgtttctgccactaagttgaatgatctttgcttctccaatgtctatgcagattcttttgtagtcaagggagatgatgtaagacaaatagcgccaggacaaactggtgttattgctgattataattataaattgccagatgatttcatgggttgtgtccttgcttggaatactaggaacattgatgctacttcaactggtaattataattataaatataggtatcttagacatggcaagcttaggccctttgagagagacatatctaatgtgcctttctcccctgatggcaaaccttgcaccccacctgctcttaattgttattggccattaaatgattatggtttttacaccactactggcattggctaccaaccttacagagttgtagtactttcttttgaacttttaaatgcaccggccacggtttgtggaccaaaattatccactgaccttattaagaaccagtgtgtcaattttaattttaatggactcactggtactggtgtgttaactccttcttcaaagagatttcaaccatttcaacaatttggccgtgatgtttctgatttcactgattccgttcgagatcctaaaacatctgaaatattagacatttcaccttgcgcttttgggggtgtaagtgtaattacacctggaacaaatgcttcatctgaagttgctgttctatatcaagatgttaactgcactgatgtttctacagcaattcatgcagatcaactcacaccagcttggcgcatatattctactggaaacaatgtattccagactcaagcaggctgtcttataggagctgagcatgtcgacacttcttatgagtgcgacattcctattggagctggcatttgtgctagttaccatacagtttctttattacgtagtactagccaaaaatctattgtggcttatactatgtctttaggtgctgatagttcaattgcttactctaataacaccattgctatacctactaacttttcaattagcattactacagaagtaatgcctgtttctatggctaaaacctccgtagattgtaatatgtacatctgcggagattctactgaatgtgctaatttgcttctccaatatggtagcttttgcacacaactaaatcgtgcactctcaggtattgctgctgaacaggatcgcaacacacgtgaagtgttcgctcaagtcaaacaaatgtacaaaaccccaactttgaaatattttggtggttttaatttttcacaaatattacctgaccctctaaagccaactaagaggtcttttattgaggacttgctctttaataaggtgacactcgctgatgctggcttcatgaagcaatatggcgaatgcctaggtgatattaatgctagagatctcatttgtgcgcagaagttcaatggacttacagtgttgccacctctgctcactgatgatatgattgctgcctacactgctgctctagttagtggtactgccactgctggatggacatttggtgctggcgctgctcttcaaataccttttgctatgcaaatggcatataggttcaatggcattggagttacccaaaatgttctctatgagaaccaaaaacaaatcgccaaccaatttaacaaggcgattagtcaaattcaagaatcacttacaacaacatcaactgcattgggcaagctgcaagacgttgttaaccagaatgctcaagcattaaacacacttgttaaacaacttagctctaattttggtgcaatttcaagtgtgctaaatgatatcctttcgcgacttgataaagtcgaggcggaggtacaaattgacaggttaattacaggcagacttcaaagccttcaaacctatgtaacacaacaactaatcagggctgctgaaatcagggcttctgctaatcttgctgctactaaaatgtctgagtgtgttcttggacaatcaaaaagagttgacttttgtggaaagggctaccaccttatgtccttcccacaagcagccccgcatggtgttgtcttcctacatgtcacgtatgtgccatcccaggagaggaacttcaccacagcgccagcaatttgtcatgaaggcaaagcatacttccctcgtgaaggtgtttttgtgtttaatggcacttcttggtttattacacagaggaacttcttttctccacaaataattactacagacaatacatttgtctcaggaaattgtgatgtcgttattggcatcattaacaacacagtttatgatcctctgcaacctgagcttgactcattcaaagaagagctggacaagtacttcaaaaatcatacatcaccagatgttgatcttggcgacatttcaggcattaacgcttctgtcgtcaacattcaaaaagaaattgaccgcctcaatgaggtcgctaaaaatttaaatgaatcactcattgaccttcaagaattgggaaaatatgagcaatatattaaatggccttggtatgtttggctcggcttcattgctggactaattgccatcgtcatggttacaatcttgctttgttgcatgactagttgttgcagttgcctcaagggtgcatgctcttgtggttcttgctgcaagtttgatgaggatgactctgagccagttctcaagggtgtcaaattacattacacataaacgaacttatggatttgtttatgagattttttactcttagatcaattactgcacagccagtaaaaattgacaatgcttctcctgcaagtactgttcatgctacagcaacgataccgctacaagcctcactccctttcggatggcttgttattggcgttgcatttcttgctgtttttcagagcgctaccaaaataattgcgctcaataaaagatggcagctagccctttataagggcttccagttcatttgcaatttactgctgctatttgttaccatctattcacatcttttgcttgtcgctgcaggtatggaggcgcaatttttgtacctctatgccttgatatattttctacaatgcatcaacgcatgtagaattattatgagatgttggctttgttggaagtgcaaatccaagaacccattactttatgatgccaactactttgtttgctggcacacacataactatgactactgtataccatataacagtgtcacagatacaattgtcgttactgaaggtgacggcatttcaacaccaaaactcaaagaagactaccaaattggtggttattctgaggataggcactcaggtgttaaagactatgtcgttgtacatggctatttcaccgaagtttactaccagcttgagtctacacaaattactacagacactggtattgaaaatgctacattcttcatctttaacaagcttgttaaagacccaccgaatgtgcaaatacacacaatcgacggctcttcaggagttgctaatccagcaatggatccaatttatgatgagccgacgacgactactagcgtgcctttgtaagcacaagaaagtgagtacgaacttatgtactcattcgtttcggaagaaacaggtacgttaatagttaatagcgtacttctttttcttgctttcgtggtattcttgctagtcacactagccatccttactgcgcttcgattgtgtgcgtactgctgcaatattgttaacgtgagtttagtaaaaccaacggtttacgtctactcgcgtgttaaaaatctgaactcttctgaaggagttcctgatcttctggtctaaacgaactaactattattattattctgtttggaactttaacattgcttatcatggcagacaacggtactattaccgttgaggagcttaaacaactcctggaacaatggaacctagtaataggtttcctattcctagcctggattatgttactacaatttgcctattctaatcggaacaggtttttgtacataataaagcttgttttcctctggctcttgtggccagtaacacttgcttgttttgtgcttgctgctgtctacagaattaattgggtgactggcgggattgcgattgcaatggcttgtattgtaggcttgatgtggcttagctacttcgttgcttccttcaggctgtttgctcgtacccgctcaatgtggtcattcaacccagaaacaaacattcttctcaatgtgcctctccgggggacaattgtgaccagaccgctcatggaaagtgaacttgtcattggtgctgtgatcattcgtggtcacttgcgaatggccggacactccctagggcgctgtgacattaaggacctgccaaaagagatcactgtggctacatcacgaacgctttcttattacaaattaggagcgtcgcagcgtgtaggcactgattcaggttttgctgcatacaaccgctaccgtattggaaactataaattaaatacagaccacgccggtagcaacgacaatattgctttgctagtacagtaagtgacaacagatgtttcatcttgttgacttccaggttacaatagcagagatattgattatcattatgaggactttcaggattgctatttggaatcttgacgttataataagttcaatagtgagacaattatttaagcctctaactaagaagaattattcggagttagatgatgaagaacctatggagttagattatccataaaacgaacatgaaaattattctcttcctgacattgattgtatttacatcttgcgagctatatcactatcaggagtgtgttagaggtacgactgtactactaaaagaaccttgcccatcaggaacatacgagggcaattcaccatttcaccctcttgctgacaataaatttgcactaacttgcactagcacacactttgcttttgcttgtgctgacggtactcgacatacctatcagctgcgtgcaagatcagtttcaccaaaacttttcatcagacaagaggaggttcaacaagagctctactcgccactttttctcattgttgctgctctagtatttttaatactttgcttcaccattaagagaaagacagaatgaatgagctcactttaattgacttctatttgtgctttttagcctttctgctattccttgttttaataatgcttattatattttggttttcactcgaaatccaggatctagaagaaccttgtaccaaagtctaaacgaacatgaaacttctcattgttttgacttgtatttctctatgcagttgcatatgcactgtagtacagcgctgtgcatctaataaacctcatgtgcttgaagatccttgtaaggtacaacactaggggtaatacttatagcactgcttggctttgtgctctaggaaaggttttaccttttcatagatggcacactatggttcaaacatgcacacctaatgttactatcaactgtcaagatccagctggtggtgcgcttatagctaggtgttggtaccttcatgaaggtcaccaaactgctgcatttagagacgtacttgttgttttaaataaacgaacaaattaaaatgtctgataatggaccccaatcaaaccaacgtagtgccccccgcattacatttggtggacccacagattcaactgacaataaccagaatggaggacgcaatggggcaaggccaaaacagcgccgaccccaaggtttacccaataatactgcgtcttggttcacagctctcactcagcatggcaaggaggaacttagattccctcgaggccagggcgttccaatcaacaccaatagtggtccagatgaccaaattggctactaccgaagagctacccgacgagttcgtggtggtgacggcaaaatgaaagagctcagccccagatggtacttctattacctaggaactggcccagaagcttcacttccctacggcgctaacaaagaaggcatcgtatgggttgcaactgagggagccttgaatacacccaaagaccacattggcacccgcaatcctaataacaatgctgccaccgtgctacaacttcctcaaggaacaacattgccaaaaggcttctacgcagagggaagcagaggcggcagtcaagcctcttctcgctcctcatcacgtagtcgcggtaattcaagaaattcaactcctggcagcagtaggggaaattctcctgctcgaatggctagcggaggtggtgaaactgccctcgcgctattgctgctagacagattgaaccagcttgagagcaaagtttctggtaaaggccaacaacaacaaggccaaactgtcactaagaaatctgctgctgaggcatctaaaaagcctcgccaaaaacgtactgccacaaaacagtacaacgtcactcaagcatttgggagacgtggtccagaacaaacccaaggaaatttcggggaccaagacctaatcagacaaggaactgattacaaacattggccgcaaattgcacaatttgctccaagtgcctctgcattctttggaatgtcacgcattggcatggaagtcacaccttcgggaacatggctgacttatcatggagccattaaattggatgacaaagatccacaattcaaagacaacgtcatactgctgaacaagcacattgacgcatacaaaacattcccaccaacagagcctaaaaaggacaaaaagaaaaagactgatgaagctcagcctttgccgcagagacaaaagaagcagcccactgtgactcttcttcctgcggctgacatggatgatttctccagacaacttcaaaattccatgagtggagcttctgctgattcaactcaggcataaacactcatgatgaccacacaaggcagatgggctatgtaaacgttttcgcaattccgtttacgatacatagtctactcttgtgcagaatgaattctcgtaactaaacagcacaagtaggtttagttaactttaatctcacatagcaatctttaatcaatgtgtaacattagggaggacttgaaagagccaccacattttcatcgaggccacgcggagtacgatcgagggtacagtgaataatgctagggagagctgcctatatggaagagccctaatgtgtaaaattaattttagtagtgctatccccatgtgattttaatagcttcttaggagaatgacaaaaaaaaaaaaaaaaaaaaaaaa

SEQ ID NO: 5537 - DNA, 30119 bp, Middle East respiratory syndrome-related coronavirus
gatttaagtgaatagcttggctatctcacttcccctcgttctcttgcagaactttgattttaacgaacttaaataaaagccctgttgtttagcgtatcgttgcacttgtctggtgggattgtggcattaatttgcctgctcatctaggcagtggacatatgctcaacactgggtataattctaattgaatactatttttcagttagagcgtcgtgtctcttgtacgtctcggtcacaatacacggtttcgtccggtgcgtggcaattcggggcacatcatgtctttcgtggctggtgtgaccgcgcaaggtgcgcgcggtacgtatcgagcagcgctcaactctgaaaaacatcaagaccatgtgtctctaactgtgccactctgtggttcaggaaacctggttgaaaaactttcaccatggttcatggatggcgaaaatgcctatgaagtggtgaaggccatgttacttaaaaaggagccacttctctatgtgcccatccggctggctggacacactagacacctcccaggtcctcgtgtgtacctggttgagaggctcattgcttgtgaaaatccattcatggttaaccaattggcttatagctctagtgcaaatggcagcctggttggcacaactttgcagggcaagcctattggtatgttcttcccttatgacatcgaacttgtcacaggaaagcaaaatattctcctgcgcaagtatggccgtggtggttatcactacaccccattccactatgagcgagacaacacctcttgccctgagtggatggacgattttgaggcggatcctaaaggcaaatatgcccagaatctgcttaagaagttgattggcggtgatgtcactccagttgaccaatacatgtgtggcgttgatggaaaacccattagtgcctacgcatttttaatggccaaggatggaataaccaaactggctgatgttgaagcggacgtcgcagcacgtgctgatgacgaaggcttcatcacattaaagaacaatctatatagattggtttggcatgttgagcgtaaagacgttccatatcctaagcaatctatttttactattaatagtgtggtccaaaaggatggtgttgaaaacactcctcctcactattttactcttggatgcaaaattttaacgctcaccccacgcaacaagtggagtggcgtttctgacttgtccctcaaacaaaaactcctttacaccttctatggtaaggagtcacttgagaacccaacctacatttaccactccgcattcattgagtgtggaagttgtggtaatgattcctggcttacagggaatgctatccaagggtttgcctgtggatgtggggcatcatatacagctaatgatgtcgaagtccaatcatctggcatgattaagccaaatgctcttctttgtgctacttgcccctttgctaagggtgatagctgttcttctaattgcaaacattcagttgctcagttggttagttacctttctgaacgctgtaatgttattgctgattctaagtccttcacacttatctttggtggcgtagcttacgcctactttggatgtgaggaaggtactatgtactttgtgcctagagctaagtctgttgtctcaaggattggagactccatctttacaggctgtactggctcttggaacaaggtcactcaaattgctaacatgttcttggaacagactcagcattcccttaactttgtgggagagttcgttgtcaacgatgttgtcctcgcaattctctctggaaccacaactaatgttgacaaaatacgccagcttctcaaaggtgtcacccttgacaagttgcgtgattatttagctgactatgacgtagcagtcactgccggcccattcatggataatgctattaatgttggtggtacaggattacagtatgccgccattactgcaccttatgtagttctcactggcttaggtgagtcctttaagaaagttgcaaccataccgtataaggtttgcaactctgttaaggatactctggcttattatgctcacagcgtgttgtacagagtttttccttatgacatggattctggtgtgtcatcctttagtgaactactttttgattgcgttgatctttcagtagcttctacctattttttagtccgcatcttgcaagataagactggcgactttatgtctacaattattacttcctgccaaactgctgttagtaagcttctagatacatgttttgaagctacagaagcaacatttaacttcttgttagatttggcaggattgttcagaatctttctccgcaatgcctatgtgtacacttcacaagggtttgtggtggtcaatggcaaagtttctacacttgtcaaacaagtgttagacttgcttaataagggtatgcaacttttgcatacaaaggtctcctgggctggttctaaaatcattgctgttatctacagcggcagggagtctctaatattcccatcgggaacctattactgtgtcaccactaaggctaagtccgttcaacaagatcttgacgttattttgcctggtgagttttccaagaagcagttaggactgctccaacctactgacaattctacaactgttagtgttactgtatccagtaacatggttgaaactgttgtgggtcaacttgagcaaactaatatgcatagtcctgatgttatagtaggtgactatgtcattattagtgaaaaattgtttgtgcgtagtaaggaagaagacggatttgccttctaccctgcttgcactaatggtcatgctgtaccgactctctttagacttaagggaggtgcacctgtaaaaaaagtagcctttggcggtgatcaagtacatgaggttgctgctgtaagaagtgttactgtcgagtacaacattcatgctgtattagacacactacttgcttcttctagtcttagaacctttgttgtagataagtctttgtcaattgaggagtttgctgacgtagtaaaggaacaagtctcagacttgcttgttaaattactgcgtggaatgccgattccagattttgatttagacgattttattgacgcaccatgctattgctttaacgctgagggtgatgcatcctggtcttctactatgatcttctctcttcaccccgtcgagtgtgacgaggagtgttctgaagtagaggcttcagatttagaagaaggtgaatcagagtgcatttctgagacttcaactgaacaagttgacgtttctcatgagacttctgacgacgagtgggctgctgcagttgatgaagcgttccctctcgatgaagcagaagatgttactgaatctgtgcaagaagaagcacaaccagtagaagtacctgttgaagatattgcgcaggttgtcatagctgacaccttacaggaaactcctgttgtgcctgatactgttgaagtcccaccgcaagtggtgaaacttccgtctgcacctcagactatccagcccgaggtaaaagaagttgcacctgtctatgaggctgataccgaacagacacagaatgttactgttaaacctaagaggttacgcaaaaagcgtaatgttgaccctttgtccaattttgaacataaggttattacagagtgcgttaccatagttttaggtgacgcaattcaagtagccaagtgctatggggagtctgtgttagttaatgctgctaacacacatcttaagcatggcggtggtatcgctggtgctattaatgcggcttcaaaaggggctgtccaaaaagagtcagatgagtatattctggctaaagggccgttacaagtaggagattcagttctcttgcaaggccattctctagctaagaatatcctgcatgtcgtaggcccagatgcccgcgctaaacaggatgtttctctccttagtaagtgctataaggctatgaatgcatatcctcttgtagtcactcctcttgtttcagcaggcatatttggtgtaaaaccagctgtgtcttttgattatcttattagggaggctaagactagagttttagtcgtcgttaattcccaagatgtctataagagtcttaccatagttgacattccacagagtttgactttttcatatgatgggttacgtggcgcaatacgtaaagctaaagattatggttttactgtttttgtgtgcacagacaactctgctaacactaaagttcttaggaacaagggtgttgattatactaagaagtttcttacagttgacggtgtgcaatattattgctacacgtctaaggacactttagatgatatcttacaacaggctaataagtctgttggtattatatctatgcctttgggatatgtgtctcatggtttagacttaatgcaagcagggagtgtcgtgcgtagagttaacgtgccctacgtgtgtctcctagctaataaagagcaagaagctattttgatgtctgaagacgttaagttaaacccttcagaagattttataaagcacgtccgcactaatggtggttacaattcttggcatttagtcgagggtgaactattggtgcaagacttacgcttaaataagctcctgcattggtctgatcaaaccatatgctacaaggatagtgtgttttatgttgtaaagaatagtacagcttttccatttgaaacactttcagcatgtcgtgcgtatttggattcacgcacgacacagcagttaacaatcgaagtcttagtgactgtcgatggtgtaaattttagaacagtcgttctaaataataagaacacttatagatcacagcttggatgcgttttctttaatggtgctgatatttctgacaccattcctgatgagaaacagaatggtcacagtttatatctagcagacaatttgactgctgatgaaacaaaggcgcttaaagagttatatggccccgttgatcctactttcttacacagattctattcacttaaggctgcagtccatgggtggaagatggttgtgtgtgataaggtacgttctctcaaattgagtgataataattgttatcttaatgcagttattatgacacttgatttattgaaggacattaaatttgttatacctgctctacagcatgcatttatgaaacataagggcggtgattcaactgacttcatagccctcattatggcttatggcaattgcacatttggtgctccagatgatgcctctcggttacttcataccgtgcttgcaaaggctgagttatgctgttctgcacgcatggtttggagagagtggtgcaatgtctgtggcataaaagatgttgttctacaaggcttaaaagcttgttgttacgtgggtgtgcaaactgttgaagatctgcgtgctcgcatgacatatgtatgccagtgtggtggtgaacgtcatcggcaattagtcgaacacaccaccccctggttgctgctctcaggcacaccaaatgaaaaattggtgacaacctccacggcgcctgattttgtagcatttaatgtctttcagggcattgaaacggctgttggccattatgttcatgctcgcctgaagggtggtcttattttaaagtttgactctggcaccgttagcaagacttcagactggaagtgcaaggtgacagatgtacttttccccggccaaaaatacagtagcgattgtaatgtcgtacggtattctttggacggtaatttcagaacagaggttgatcccgacctatctgctttctatgttaaggatggtaaatactttacaagtgaaccacccgtaacatattcaccagctacaattttagctggtagtgtctacactaatagctgccttgtatcgtctgatggacaacctggcggtgatgctattagtttgagttttaataaccttttagggtttgattctagtaaaccagtcactaagaaatacacttactccttcttgcctaaagaagacggcgatgtgttgttggctgagtttgacacttatgaccctatttataagaatggtgccatgtataaaggcaaaccaattctttgggtcaataaagcatcttatgatactaatcttaataagttcaatagagctagtttgcgtcaaatttttgacgtagcccccattgaactcgaaaataaattcacacctttgagtgtggagtctacaccagttgaacctccaactgtagatgtggtagcacttcaacaggaaatgacaattgtcaaatgtaagggtttaaataaacctttcgtgaaggacaatgtcagtttcgttgctgatgattcaggtactcccgttgttgagtatctgtctaaagaagacctacatacattgtatgtagaccctaagtatcaagtcattgtcttaaaagacaatgtactttcttctatgcttagattgcacaccgttgagtcaggtgatattaacgttgttgcagcttccggatctttgacacgtaaagtgaagttactatttagggcttcattttatttcaaagaatttgctacccgcactttcactgctaccactgctgtaggtagttgtataaagagtgtagtgcggcatctaggtgttactaaaggcatattgacaggctgttttagttttgccaagatgttatttatgcttccactagcttactttagtgattcaaaactcggcaccacagaggttaaagtgagtgctttgaaaacagccggcgttgtgacaggtaatgttgtaaaacagtgttgcactgctgctgttgatttaagtatggataagttgcgccgtgtggattggaaatcaaccctacggttgttacttatgttatgcacaactatggtattgttgtcttctgtgtatcacttgtatgtcttcaatcaggtcttatcaagtgatgttatgtttgaagatgcccaaggtttgaaaaagttctacaaagaagttagagcttacctaggaatctcttctgcttgtgacggtcttgcttcagcttatagggcgaattcctttgatgtacctacattctgcgcaaaccgttctgcaatgtgtaattggtgcttgattagccaagattccataactcactacccagctcttaagatggttcaaacacatcttagccactatgttcttaacatagattggttgtggtttgcatttgagactggtttggcatacatgctctatacctcggccttcaactggttgttgttggcaggtacattgcattatttctttgcacagacttccatatttgtagactggcggtcatacaattatgctgtgtctagtgccttctggttattcacccacattccaatggcgggtttggtacgaatgtataatttgttagcatgcctttggcttttacgcaagttttatcagcatgtaatcaatggttgcaaagatacggcatgcttgctctgctataagaggaaccgacttactagagttgaagcttctaccgttgtctgtggtggaaaacgtacgttttatatcacagcaaatggcggtatttcattctgtcgtaggcataattggaattgtgtggattgtgacactgcaggtgtggggaataccttcatctgtgaagaagtcgcaaatgacctcactaccgccctacgcaggcctattaacgctacggatagatcacattattatgtggattccgttacagttaaagagactgttgttcagtttaattatcgtagagacggtcaaccattctacgagcggtttcccctctgcgcttttacaaatctagataagttgaagttcaaagaggtctgtaaaactactactggtatacctgaatacaactttatcatctacgactcatcagatcgtggccaggaaagtttagctaggtctgcatgtgtttattattctcaagtcttgtgtaaatcaattcttttggttgactcaagtttggttacttctgttggtgattctagtgaaatcgccactaaaatgtttgattcctttgttaatagtttcgtctcgctgtataatgtcacacgcgataagttggaaaaacttatctctactgctcgtgatggcgtaaggcgaggcgataacttccatagtgtcttaacaacattcattgacgcagcacgaggccccgcaggtgtggagtctgatgttgagaccaatgaaattgttgactctgtgcagtatgctcataaacatgacatacaaattactaatgagagctacaataattatgtaccctcatatgttaaacctgatagtgtgtctaccagcgatttaggtagtctcattgattgtaatgcggcttcagttaaccaaattgtcttgcgtaattctaatggtgcttgcatttggaacgctgctgcatatatgaaactctcggatgcacttaaacgacagattcgcattgcatgccgtaagtgtaatttagctttccggttaaccacctcaaagctacgcgctaatgataatatcttatcagttagattcactgctaacaaaattgttggtggtgctcctacatggtttaatgcgttgcgtgactttacgttaaagggttatgttcttgctaccattattgtgtttctgtgtgctgtactgatgtatttgtgtttacctacattttctatggcacctgttgaattttatgaagaccgcatcttggactttaaagttcttgataatggtatcattagggatgtaaatcctgatgataagtgctttgctaataagcaccggtccttcacacaatggtatcatgagcatgttggtggtgtctatgacaactctatcacatgcccattgacagttgcagtaattgctggagttgctggtgctcgcattccagacgtacctactacattggcttgggtgaacaatcagataattttctttgtttctcgagtctttgctaatacaggcagtgtttgctacactcctatagatgagataccctataagagtttctctgatagtggttgcattcttccatctgagtgcactatgtttagggatgcagagggccgtatgacaccatactgccatgatcctactgttttgcctggggcttttgcgtacagtcagatgaggcctcatgttcgttacgacttgtatgatggtaacatgtttattaaatttcctgaagtagtatttgaaagtacacttaggattactagaactctgtcaactcagtactgccggttcggtagttgtgagtatgcacaagagggtgtttgtattaccacaaatggctcgtgggccatttttaatgaccaccatcttaatagacctggtgtctattgtggctctgattttattgacattgtcaggcggttagcagtatcactgttccagcctattacttatttccaattgactacctcattggtcttgggtataggtttgtgtgcgttcctgactttgctcttctattatattaataaagtaaaacgtgcttttgcagattacacccagtgtgctgtaattgctgttgttgctgctgttcttaatagcttgtgcatctgctttgttacctctataccattgtgtatagtaccttacactgcattgtactattatgctacattctattttactaatgagcctgcatttattatgcatgtttcttggtacattatgttcgggcctatcgttcccatatggatgacctgcgtctatacagttgcaatgtgctttagacacttcttctgggttttagcttattttagtaagaaacatgtagaagtttttactgatggtaagcttaattgtagtttccaggacgctgcctctaatatctttgttattaacaaggacacttatgcagctcttagaaactctttaactaatgatgcctattcacgatttttggggttgtttaacaagtataagtacttctctggtgctatggaaacagccgcttatcgtgaagctgcagcatgtcatcttgctaaagccttacaaacatacagcgagactggtagtgatcttctttaccaaccacccaactgtagcataacctctggcgtgttgcaaagcggtttggtgaaaatgtcacatcccagtggagatgttgaggcttgtatggttcaggttacctgcggtagcatgactcttaatggtctttggcttgacaacacagtctggtgcccacgacacgtaatgtgcccggctgaccagttgtctgatcctaattatgatgccttgttgatttctatgactaatcatagtttcagtgtgcaaaaacacattggcgctccagcaaacttgcgtgttgttggtcatgccatgcaaggcactcttttgaagttgactgtcgatgttgctaaccctagcactccagcctacacttttacaacagtgaaacctggcgcagcatttagtgtgttagcatgctataatggtcgtccgactggtacattcactgttgtaatgcgccctaactacacaattaagggttcctttctgtgtggttcttgtggtagtgttggttacaccaaggagggtagtgtgatcaatttctgttacatgcatcaaatggaacttgctaatggtacacataccggttcagcatttgatggtactatgtatggtgcctttatggataaacaagtgcaccaagttcagttaacagacaaatactgcagtgttaatgtagtagcttggctttacgcagcaatacttaatggttgcgcttggtttgtaaaacctaatcgcactagtgttgtttcttttaatgaatgggctcttgccaaccaattcactgaatttgttggcactcaatccgttgacatgttagctgtcaaaacaggcgttgctattgaacagctgctttatgcgatccaacaactgtatactgggttccagggaaagcaaatccttggcagtaccatgttggaagatgaattcacacctgaggatgttaatatgcagattatgggtgtggttatgcagagtggtgtgagaaaagttacatatggtactgcgcattggttgtttgcgacccttgtctcaacctatgtgataatcttacaagccactaaatttactttgtggaactacttgtttgagactattcccacacagttgttcccactcttatttgtgactatggccttcgttatgttgttggttaaacacaaacacacctttttgacacttttcttgttgcctgtggctatttgtttgacttatgcaaacatagtctacgagcccactactcccatttcgtcagcgctgattgcagttgcaaattggcttgcccccactaatgcttatatgcgcactacacatactgatattggtgtctacattagtatgtcacttgtattagtcattgtagtgaagagattgtacaacccatcactttctaactttgcgttagcattgtgcagtggtgtaatgtggttgtacacttatagcattggagaagcctcaagccccattgcctatctggtttttgtcactacactcactagtgattatacgattacagtctttgttactgtcaaccttgcaaaagtttgcacttatgccatctttgcttactcaccacagcttacacttgtgtttccggaagtgaagatgatacttttattatacacatgtttaggtttcatgtgtacttgctattttggtgtcttctctcttttgaaccttaagcttagagcacctatgggtgtctatgactttaaggtctcaacacaagagttcagattcatgactgctaacaatctaactgcacctagaaattcttgggaggctatggctctgaactttaagttaataggtattggcggtacaccttgtataaaggttgctgctatgcagtctaaacttacagatcttaaatgcacatctgtggttctcctctctgtgctccaacagttacacttagaggctaatagtagggcctgggctttctgtgttaaatgccataatgatatattggcagcaacagaccccagtgaggctttcgagaaattcgtaagtctctttgctactttaatgactttttctggtaatgtagatcttgatgcgttagctagtgatatttttgacactcctagcgtacttcaagctactctttctgagttttcacacttagctacctttgctgagttggaagctgcgcagaaagcctatcaggaagctatggactctggtgacacctcaccacaagttcttaaggctttgcagaaggctgttaatatagctaaaaacgcctatgagaaggataaggcagtggcccgtaagttagaacgtatggctgatcaggctatgacttctatgtataagcaagcacgtgctgaagacaagaaagcaaaaattgtcagtgctatgcaaactatgttgtttggtatgattaagaagctcgacaacgatgttcttaatggtatcatttctaacgctaggaatggttgtatacctcttagtgtcatcccactgtgtgcttcaaataaacttcgcgttgtaattcctgacttcaccgtctggaatcaggtagtcacatatccctcgcttaactacgctggggctttgtgggacattacagttataaacaatgtggacaatgaaattgttaagtcttcagatgttgtagacagcaatgaaaatttaacatggccacttgttttagaatgcactagggcatccacttctgccgttaagttgcaaaataatgagatcaaaccttcaggtctaaaaaccatggttgtgtctgcgggtcaagagcaaactaactgtaatactagttccttagcttattacgaacctgtgcagggtcgtaaaatgctgatggctcttctttctgataatgcctatctcaaatgggcgcgtgttgaaggtaaggacggatttgtcagtgtagagctacaacctccttgcaaattcttgattgcgggaccaaaaggacctgaaatccgatatctctattttgttaaaaatcttaacaaccttcatcgcgggcaagtgttagggcacattgctgcgactgttagattgcaagctggttctaacaccgagtttgcctctaattcctcggtgttgtcacttgttaacttcaccgttgatcctcaaaaagcttatctcgatttcgtcaatgcgggaggtgccccattgacaaattgtgttaagatgcttactcctaaaactggtacaggtatagctatatctgttaaaccagagagtacagctgatcaagagacttatggtggagcttcagtgtgtctctattgccgtgcgcatatagaacatcctgatgtctctggtgtttgtaaatataagggtaagtttgtccaaatccctgctcagtgtgtccgtgaccctgtgggattttgtttgtcaaataccccctgtaatgtctgtcaatattggattggatatgggtgcaattgtgactcgcttaggcaagcagcactgccccaatctaaagattccaattttttaaacgagtccggggttctattgtaaatgcccgaatagaaccctgttcaagtggtttgtccactgatgtcgtctttagggcatttgacatctgcaactataaggctaaggttgctggtattggaaaatactacaagactaatacttgtaggtttgtagaattagatgaccaagggcatcatttagactcctattttgtcgttaagaggcatactatggagaattatgaactagagaagcactgttacgacttgttacgtgactgtgatgctgtagctccccatgatttcttcatctttgatgtagacaaagttaaaacacctcatattgtacgtcagcgtttaactgagtacactatgatggatcttgtatatgccctgaggcactttgatcaaaatagcgaagtgcttaaggctatcttagtgaagtatggttgctgtgatgttacctactttgaaaataaactctggtttgattttgttgaaaatcccagtgttattggtgtttatcataaacttggagaacgtgtacgccaagctatcttaaacactgttaaattttgtgaccacatggtcaaggctggtttagtcggtgtgctcacactagacaaccaggaccttaatggcaagtggtatgattttggtgacttcgtaatcactcaacctggttcaggagtagctatagttgatagctactattcttatttgatgcctgtgctctcaatgaccgattgtctggccgctgagacacatagggattgtgattttaataaaccactcattgagtggccacttactgagtatgattttactgattataaggtacaactctttgagaagtactttaaatattgggatcagacgtatcacgcaaattgcgttaattgtactgatgaccgttgtgtgttacattgtgctaatttcaatgtattgtttgctatgaccatgcctaagacttgtttcggacccatagtccgaaagatctttgttgatggcgtgccatttgtagtatcttgtggttatcactacaaagaattaggtttagtcatgaatatggatgttagtctccatagacataggctctctcttaaggagttgatgatgtatgccgctgatccagccatgcacattgcctcctctaacgcttttcttgatttgaggacatcatgttttagtgtcgctgcacttacaactggtttgacttttcaaactgtgcggcctggcaattttaaccaagacttctatgatttcgtggtatctaaaggtttctttaaggagggctcttcagtgacgctcaaacattttttctttgctcaagatggtaatgctgctattacagattataattactattcttataatctgcctactatgtgtgacatcaaacaaatgttgttctgcatggaagttgtaaacaagtacttcgaaatctatgacggtggttgtcttaatgcttctgaagtggttgttaataatttagacaagagtgctggccatccttttaataagtttggcaaagctcgtgtctattatgagagcatgtcttaccaggagcaagatgaactttttgccatgacaaagcgtaacgtcattcctaccatgactcaaatgaatctaaaatatgctattagtgctaagaatagagctcgcactgttgcaggcgtgtccatacttagcacaatgactaatcgccagtaccatcagaaaatgcttaagtccatggctgcaactcgtggagcgacttgcgtcattggtactacaaagttctacggtggctgggatttcatgcttaaaacattgtacaaagatgttgataatccgcatcttatgggttgggattaccctaagtgtgatagagctatgcctaatatgtgtagaatcttcgcttcactcatattagctcgtaaacatggcacttgttgtactacaagggacagattttatcgcttggcaaatgagtgtgctcaggtgctaagcgaatatgttctatgtggtggtggttactacgtcaaacctggaggtaccagtagcggagatgccaccactgcatatgccaatagtgtctttaacattttgcaggcgacaactgctaatgtcagtgcacttatgggtgctaatggcaacaagattgttgacaaagaagttaaagacatgcagtttgatttgtatgtcaatgtttacaggagcactagcccagaccccaaatttgttgataaatactatgcttttcttaataagcacttttctatgatgatactgtctgatgacggtgtcgtttgctataatagtgattatgcagctaagggttacattgctggaatacagaattttaaggaaacgctgtattatcagaacaatgtctttatgtctgaagctaaatgctgggtggaaaccgatctgaagaaagggccacatgaattctgttcacagcatacgctttatattaaggatggcgacgatggttacttccttccttatccagacccttcaagaattttgtctgccggttgctttgtagatgatatcgttaagactgacggtacactcatggtagagcggtttgtgtctttggctatagatgcttaccctctcacaaagcatgaagatatagaataccagaatgtattctgggtctacttacagtatatagaaaaactgtataaagaccttacaggacacatgcttgacagttattctgtcatgctatgtggtgataattctgctaagttttgggaagaggcattctatagagatctctatagttcgcctaccactttgcaggctgtcggttcatgcgttgtatgccattcacagacttccctacgctgtgggacatgcatccgtagaccatttctctgctgtaaatgctgctatgatcatgttatagcaactccacataagatggttttgtctgtttctccttacgtttgtaatgcccctggttgtggcgtttcagacgttactaagctatatttaggtggtatgagctacttttgtgtagatcatagacctgtgtgtagttttccactttgcgctaatggtcttgtattcggcttatacaagaatatgtgcacaggtagtccttctatagttgaatttaataggttggctacctgtgactggactgaaagtggtgattacacccttgccaatactacaacagaaccactcaaactttttgctgctgagactttacgtgccactgaagaggcgtctaagcagtcttatgctattgccaccatcaaagaaattgttggtgagcgccaactattacttgtgtgggaggctggcaagtccaaaccaccactcaatcgtaattatgtttttactggttatcatataaccaaaaatagtaaagtgcagctcggtgagtacattttcgagcgcattgattatagtgatgctgtatcctacaagtctagtacaacgtataaactgactgtaggtgacatcttcgtacttacctctcactctgtggctaccttgacggcgcccacaattgtgaatcaagagaggtatgttaaaattactgggttgtacccaaccattacggtacctgaagagttcgcaagtcatgttgccaacttccaaaaatcaggttatagtaaatatgtcactgttcagggaccacctggcactggcaaaagtcattttgctatagggttagcgatttactaccctacagcacgtgttgtttatacagcatgttcacacgcagctgttgatgctttgtgtgaaaaagcttttaaatatttgaacattgctaaatgttcccgtatcattcctgcaaaggcacgtgttgagtgctatgacaggtttaaagttaatgagacaaattctcaatatttgtttagtactattaatgctctaccagaaacttctgccgatattctggtggttgatgaggttagtatgtgcactaattatgatctttcaattattaatgcacgtattaaagctaagcacattgtctatgtaggagatccagcacagttgccagctcctaggactttgttgactagaggcacattggaaccagaaaatttcaatagtgtcactagattgatgtgtaacttaggtcctgacatatttttaagtatgtgctacaggtgtcctaaggaaatagtaagcactgtgagcgctcttgtctacaataataaattgttagccaagaaggagctttcaggccagtgctttaaaatactctataagggcaatgtgacgcatgatgctagctctgccattaatagaccacaactcacatttgtgaagaattttattactgccaatccggcatggagtaaggcagtctttatttcgccttacaattcacagaatgctgtgtctcgttcaatgctgggtcttaccactcagactgttgattcctcacagggttcagaataccagtacgttatcttctgtcaaacagcagatacggcacatgctaacaacattaacagatttaatgttgcaatcactcgtgcccaaaaaggtattctttgtgttatgacatctcaggcactctttgagtccttagagtttactgaattgtcttttactaattacaagctccagtctcagattgtaactggcctttttaaagattgctctagagaaacttctggcctctcacctgcttatgcaccaacatatgttagtgttgatgacaagtataagacgagtgatgagctttgcgtgaatcttaatttacccgcaaatgtcccatactctcgtgttatttccaggatgggctttaaactcgatgcaacagttcctggatatcctaagcttttcattactcgtgaagaggctgtaaggcaagttcgaagctggataggcttcgatgttgagggtgctcatgcttcccgtaatgcatgtggcaccaatgtgcctctacaattaggattttcaactggtgtgaactttgttgttcagccagttggtgttgtagacactgagtggggtaacatgttaacgggcattgctgcacgtcctccaccaggtgaacagtttaagcacctcgtgcctcttatgcataagggggctgcgtggcctattgttagacgacgtatagtgcaaatgttgtcagacactttagacaaattgtctgattactgtacgtttgtttgttgggctcatggctttgaattaacgtctgcatcatacttttgcaagataggtaaggaacagaagtgttgcatgtgcaatagacgcgctgcagcgtactcttcacctctgcaatcttatgcctgctggactcattcctgcggttatgattatgtctacaaccctttctttgtcgatgttcaacagtggggttatgtaggcaatcttgctactaatcacgatcgttattgctctgtccatcaaggagctcatgtggcttctaatgatgcaataatgactcgttgtttagctattcattcttgttttatagaacgtgtggattgggatatagagtatccttatatctcacatgaaaagaaattgaattcctgttgtagaatcgttgagcgcaacgtcgtacgtgctgctcttcttgccggttcatttgacaaagtctatgatattggcaatcctaaaggaattcctattgttgatgaccctgtggttgattggcattattttgatgcacagcccttgaccaggaaggtacaacagcttttctatacagaggacatggcctcaagatttgctgatgggctctgcttattttggaactgtaatgtaccaaaatatcctaataatgcaattgtatgcaggtttgacacacgtgtgcattctgagttcaatttgccaggttgtgatggcggtagtttgtatgttaacaagcacgcttttcatacaccagcatatgatgtgagtgcattccgtgatctgaaacctttaccattcttttattattctactacaccatgtgaagtgcatggtaatggtagtatgatagaggatattgattatgtacccctaaaatctgcagtctgtattacagcttgtaatttagggggcgctgtttgtaggaagcatgctacagagtacagagagtatatggaagcatataatcttgtctctgcatcaggtttccgcctttggtgttataagacctttgatatttataatctctggtctacttttacaaaagttcaaggtttggaaaacattgcttttaatgttgttaaacaaggccattttattggtgttgagggtgaactacctgtagctgtagtcaatgataagatcttcaccaagagtggcgttaatgacatttgtatgtttgagaataaaaccactttgcctactaatatagcttttgaactctatgctaagcgtgctgtacgctcgcatcccgatttcaaattgctacacaatttacaagcagacatttgctacaagttcgtcctttgggattatgaacgtagcaatatttatggtactgctactattggtgtatgtaagtacactgatattgatgttaattcagctttgaatatatgttttgacatacgcgataattgttcattggagaagttcatgtctactcccaatgccatctttatttctgatagaaaaatcaagaaatacccttgtatggtaggtcctgattatgcttacttcaatggtgctatcatccgtgatagtgatgttgttaaacaaccagtgaagttctacttgtataagaaagtcaataatgagtttattgatcctactgagtgtatttacactcagagtcgctcttgtagtgacttcctacccctttctgacatggagaaagactttctatcttttgatagtgatgttttcattaagaagtatggcttggaaaactatgcttttgagcacgtagtctatggagacttctctcatactacgttaggcggtcttcacttgcttattggtttatacaagaagcaacaggaaggtcatattattatggaagaaatgctaaaaggtagctcaactattcataactattttattactgagactaacacagcggcttttaaggcggtgtgttctgttatagatttaaagcttgacgactttgttatgattttaaagagtcaagaccttggcgtagtatccaaggttgtcaaggttcctattgacttaacaatgattgagtttatgttatggtgtaaggatggacaggttcaaaccttctaccctcgactccaggcttctgcagattggaaacctggtcatgcaatgccatccctctttaaagttcaaaatgtaaaccttgaacgttgtgagcttgctaattacaagcaatctattcctatgcctcgcggtgtgcacatgaacatcgctaaatatatgcaattgtgccagtatttaaatacttgcacattagccgtgcctgccaatatgcgtgttatacattttggcgctggttctgataaaggtatcgctcctggtacctcagttttacgacagtggcttcctacagatgccattattatagataatgatttaaatgagttcgtgtcagatgctgacataactttatttggagattgtgtaactgtacgtgtcggccaacaagtggatcttgttatttccgacatgtatgatcctactactaagaatgtaacaggtagtaatgagtcaaaggctttattctttacttacctgtgtaacctcattaataataatcttgctcttggtgggtctgttgctattaaaataacagaacactcttggagcgttgaactttatgaacttatgggaaaatttgcttggtggactgttttctgcaccaatgcaaatgcatcctcatctgaaggattcctcttaggtattaattacttgggtactattaaagaaaatatagatggtggtgctatgcacgccaactatatattttggagaaattccactcctatgaatctgagtacttactcactttttgatttatccaagtttcaattaaaattaaaaggaacaccagttcttcaattaaaggagagtcaaattaacgaactcgtaatatctctcctgtcgcagggtaagttacttatccgtgacaatgatacactcagtgtttctactgatgttcttgttaacacctacagaaagttacgttgatgtagggccagattctgttaagtctgcttgtattgaggttgatatacaacagactttctttgataaaacttggcctaggccaattgatgtttctaaggctgacggtattatataccctcaaggccgtacatattctaacataactatcacttatcaaggtctttttccctatcagggagaccatggtgatatgtatgtttactctgcaggacatgctacaggcacaactccacaaaagttgtttgtagctaactattctcaggacgtcaaacagtttgctaatgggtttgtcgtccgtataggagcagctgccaattccactggcactgttattattagcccatctaccagcgctactatacgaaaaatttaccctgcttttatgctgggttcttcagttggtaatttctcagatggtaaaatgggccgcttcttcaatcatactctagttcttttgcccgatggatgtggcactttacttagagctttttattgtattctagagcctcgctctggaaatcattgtcctgctggcaattcctatacttcttttgccacttatcacactcctgcaacagattgttctgatggcaattacaatcgtaatgccagtctgaactcttttaaggagtattttaatttacgtaactgcacctttatgtacacttataacattaccgaagatgagattttagagtggtttggcattacacaaactgctcaaggtgttcacctcttctcatctcggtatgttgatttgtacggcggcaatatgtttcaatttgccaccttgcctgtttatgatactattaagtattattctatcattcctcacagtattcgttctatccaaagtgatagaaaagcttgggctgccttctacgtatataaacttcaaccgttaactttcctgttggatttttctgttgatggttatatacgcagagctatagactgtggttttaatgatttgtcacaactccactgctcatatgaatccttcgatgttgaatctggagtttattcagtttcgtctttcgaagcaaaaccttctggctcagttgtggaacaggctgaaggtgttgaatgtgatttttcacctcttctgtctggcacacctcctcaggtttataatttcaagcgtttggtttttaccaattgcaattataatcttaccaaattgctttcacttttttctgtgaatgattttacttgtagtcaaatatctccagcagcaattgctagcaactgttattcttcactgattttggattacttttcatacccacttagtatgaaatccgatctcagtgttagttctgctggtccaatatcccagtttaattataaacagtccttttctaatcccacatgtttgattttagcgactgttcctcataaccttactactattactaagcctcttaagtacagctatattaacaagtgctctcgtcttctttctgatgatcgtactgaagtacctcagttagtgaacgctaatcaatactcaccctgtgtatccattgtcccatccactgtgtgggaagacggtgattattataggaaacaactatctccacttgaaggtggtggctggcttgttgctagtggctcaactgttgccatgactgagcaattacagatgggctttggtattacagttcaatatggtacagacaccaatagtgtttgccccaagcttgaatttgctaatgacacaaaaattgcctctcaattaggcaattgcgtggaatattccctctatggtgtttcgggccgtggtgtttttcagaattgcacagctgtaggtgttcgacagcagcgctttgtttatgatgcgtaccagaatttagttggctattattctgatgatggcaactactactgtttgcgtgcttgtgttagtgttcctgtttctgtcatctatgataaagaaactaaaacccacgctactctatttggtagtgttgcatgtgaacacatttcttctaccatgtctcaatactcccgttctacgcgatcaatgcttaaacggcgagattctacatatggcccccttcagacacctgttggttgtgtcctaggacttgttaattcctctttgttcgtagaggactgcaagttgcctcttggtcaatctctctgtgctcttcctgacacacctagtactctcacacctcgcagtgtgcgctctgttccaggtgaaatgcgcttggcatccattgcttttaatcatcctattcaggttgatcaacttaatagtagttattttaaattaagtatacccactaatttttcctttggtgtgactcaggagtacattcagacaaccattcagaaagttactgttgattgtaaacagtacgtttgcaatggtttccagaagtgtgagcaattactgcgcgagtatggccagttttgttccaaaataaaccaggctctccatggtgccaatttacgccaggatgattctgtacgtaatttgtttgcgagcgtgaaaagctctcaatcatctcctatcataccaggttttggaggtgactttaatttgacacttctagaacctgtttctatatctactggcagtcgtagtgcacgtagtgctattgaggatttgctatttgacaaagtcactatagctgatcctggttatatgcaaggttacgatgattgcatgcagcaaggtccagcatcagctcgtgatcttatttgtgctcaatatgtggctggttacaaagtattacctcctcttatggatgttaatatggaagccgcgtatacttcatctttgcttggcagcatagcaggtgttggctggactgctggcttatcctcctttgctgctattccatttgcacagagtatcttttataggttaaacggtgttggcattactcaacaggttctttcagagaaccaaaagcttattgccaataagtttaatcaggctctgggagctatgcaaacaggcttcactacaactaatgaagcttttcagaaggttcaggatgctgtgaacaacaatgcacaggctctatccaaattagctagcgagctatctaatacttttggtgctatttccgcctctattggagacatcatacaacgtcttgatgttctcgaacaggacgcccaaatagacagacttattaatggccgtttgacaacactaaatgcttttgttgcacagcagcttgttcgttccgaatcagctgctctttccgctcaattggctaaagataaagtcaatgagtgtgtcaaggcacaatccaagcgttctggattttgcggtcaaggcacacatatagtgtcctttgttgtaaatgcccctaatggcctttacttcatgcatgttggttattaccctagcaaccacattgaggttgtttctgcttatggtctttgcgatgcagctaaccctactaattgtatagcccctgttaatggctactttattaaaactaataacactaggattgttgatgagtggtcatatactggctcgtccttctatgcacctgagcccattacctcccttaatactaagtatgttgcaccacaggtgacataccaaaacatttctactaacctccctcctcctcttctcggcaattccaccgggattgacttccaagatgagttggatgagtttttcaaaaatgttagcaccagtatacctaattttggttccctaacacagattaatactacattactcgatcttacctacgagatgttgtctcttcaacaagttgttaaagcccttaatgagtcttacatagaccttaaagagcttggcaattatacttattacaacaaatggccgtggtacatttggcttggtttcattgctgggcttgttgccttagctctatgcgtcttcttcatactgtgctgcactggttgtggcacaaactgtatgggaaaacttaagtgtaatcgttgttgtgatagatacgaggaatacgacctcgagccgcataaggttcatgttcactaattaacgaactattaatgagagttcaaagaccacccactctcttgttagtgttttcactctctcttttggtcactgcatcctcaaaacctctctatgtacctgagcattgtcagaattattctggttgcatgcttagggcttgtattaaaactgcccaagctgatacagctggtctttatacaaattttcgaattgacgtcccatctgcagaatcaactggtactcaatcagtttctgtcgatcttgagtcaacttcaactcatgatggtcctaccgaacatgttactagtgtgaatctttttgacgttggttactcagttaattaacgaactctatggattacgtgtctctgcttaatcaaatttggcagaagtaccttaactcaccgtatactacttgtttgtacatccctaaacccacagctaagtatacacctttagttggcacttcattgcaccctgtgctgtggaactgtcagctatcctttgctggttatactgaatctgctgttaattctacaaaagctttggccaaacaggacgcagctcagcgaatcgcttggttgctacataaggatggaggaatccctgatggatgttccctctacctccggcactcaagtttattcgcgcaaagcgaggaagaggagccattctccaactaagaaactgcgctacgttaagcgtagattttctcttctgcgccatgaagaccttagtgttattgtccaaccaacacactatgtcagggttacattttcagaccccaacatgtggtatctacgttcgggtcatcatttacactcagttcacaattggcttaaaccttatggcggccaacctgtttctgagtaccatattactctagctttgctaaatctcactgatgaagatttagctagagatttttcacccattgcgctctttttgcgcaatgtcagatttgagctacatgagttcgccttgctgcgcaaaactcttgttcttaatgcatcagagatctactgtgctaacatacatagatttaagcctgtgtatagagttaacacggcaatccctactattaaggattggcttctcgttcagggattttccctttaccatagtggcctccctttacatatgtcaatctctaaattgcatgcactggatgatgttactcgcaattacatcattacaatgccatgctttagaacttaccctcaacaaatgtttgttactcctttggccgtagatgttgtctccatacggtcttccaatcagggtaataaacaaattgttcattcttatcccattttacatcatccaggattttaacgaactatggctttctcggcgtctttatttaaacccgtccagctagtcccagtttctcctgcatttcatcgcattgagtctactgactctattgttttcacatacattcctgctagcggctatgtagctgctttagctgtcaatgtgtgtctcattcccctattattactgctacgtcaagatacttgtcgtcgcagcattatcagaactatggttctctatttccttgttctgtataactttttattagccattgtactagtcaatggtgtacattatccaactggaagttgcctgatagccttcttagttatcctcataatactttggtttgtagatagaattcgtttctgtctcatgctgaattcctacattccactgtttgacatgcgttcccactttattcgtgttagtacagtttcttctcatggtatggtccctgtaatacacaccaaaccattatttattagaaacttcgatcagcgttgcagctgttctcgttgtttttatttgcactcttccacttatatagagtgcacttatattagccgttttagtaagattagcctagtttctgtaactgacttctccttaaacggcaatgtttccactgttttcgtgcctgcaacgcgcgattcagttcctcttcacataatcgccccgagctcgcttatcgtttaagcagctctgcgctactatgggtcccgtgtagaggctaatccattagtctctctttggacatatggaaaacgaactatgttaccctttgtccaagaacgaatagggttgttcatagtaaactttttcatttttaccgtagtatgtgctataacactcttggtgtgtatggctttccttacggctactagattatgtgtgcaatgtatgacaggcttcaataccctgttagttcagcccgcattatacttgtataatactggacgttcagtctatgtaaaattccaggatagtaaaccccctctaccacctgacgagtgggtttaacgaactccttcataatgtctaatatgacgcaactcactgaggcgcagattattgccattattaaagactggaactttgcatggtccctgatctttctcttaattactatcgtactacagtatggatacccatcccgtagtatgactgtctatgtctttaaaatgtttgttttatggctcctatggccatcttccatggcgctatcaatatttagcgccgtttatccaattgatctagcttcccagataatctctggcattgtagcagctgtttcagctatgatgtggatttcctactttgtgcagagtatccggctgtttatgagaactggatcatggtggtcattcaatcctgagactaattgccttttgaacgttccatttggtggtacaactgtcgtacgtccactcgtagaggactctaccagtgtaactgctgttgtaaccaatggccacctcaaaatggctggcatgcatttcggtgcttgtgactacgacagacttcctaatgaagtcaccgtggccaaacccaatgtgctgattgctttaaaaatggtgaagcggcaaagctacggaactaattccggcgttgccatttaccatagatataaggcaggtaattacaggagtccgcctattacggcggatattgaacttgcattgcttcgagcttaggctctttagtaagagtatcttaattgattttaacgaatctcaatttcattgttatggcatcccctgctgcacctcgtgctgtttcctttgccgataacaatgatataacaaatacaaacctatctcgaggtagaggacgtaatccaaaaccacgagctgcaccaaataacactgtctcttggtacactgggcttacccaacacgggaaagtccctcttacctttccacctgggcagggtgtacctcttaatgccaattctacccctgcgcaaaatgctgggtattggcggagacaggacagaaaaattaataccgggaatggaattaagcaactggctcccaggtggtacttctactacactggaactggacccgaagcagcactcccattccgggctgttaaggatggcatcgtttgggtccatgaagatggcgccactgatgctccttcaacttttgggacgcggaaccctaacaatgattcagctattgttacacaattcgcgcccggtactaagcttcctaaaaacttccacattgaggggactggaggcaatagtcaatcatcttcaagagcctctagcttaagcagaaactcttccagatctagttcacaaggttcaagatcaggaaactctacccgcggcacttctccaggtccatctggaatcggagcagtaggaggtgatctactttaccttgatcttctgaacagactacaagcccttgagtctggcaaagtaaagcaatcgcagccaaaagtaatcactaagaaagatgctgctgctgctaaaaataagatgcgccacaagcgcacttccaccaaaagtttcaacatggtgcaagcttttggtcttcgcggaccaggagacctccagggaaactttggtgatcttcaattgaataaactcggcactgaggacccacgttggccccaaattgctgagcttgctcctacagccagtgcttttatgggtatgtcgcaatttaaacttacccatcagaacaatgatgatcatggcaaccctgtgtacttccttcggtacagtggagccattaaacttgacccaaagaatcccaactacaataagtggttggagcttcttgagcaaaatattgatgcctacaaaaccttccctaagaaggaaaagaaacaaaaggcaccaaaagaagaatcaacagaccaaatgtctgaacctccaaaggagcagcgtgtgcaaggtagcatcactcagcgcactcgcacccgtccaagtgttcagcctggtccaatgattgatgttaacactgattagtgtcactcaaagtaacaagatcgcggcaatcgtttgtgtttggcaaccccatctcaccatcgcttgtccactcttgcacagaatggaatcatgttgtaattacagtgcaataaggtaattataacccatttaattgatagctatgctttattaaagtgtgtagctgtagagagaatgttaaagactgtcacctctgcttgattgcaagtgaacagtgccccccgggaagagctctacagtgtgaaatgtaaataaaaaatagctattattcaattagattaggctaattagatgatttgcaaaaaaaaaaaa

SEQ ID NO: 5538 - DNA, 30741 bp, Unknown
  Description of Unknown: Human coronavirus
attgtgagcgatttgcgtgcgtgcatcccgcttcactgatctcttgttagatctttttgtaatctaaactttataaaaacatccactccctgtaatctatgcttgtgggcgtagatttttcatagtggtgtttatattcatttctgctgttaacagctttcagccagggacgtgttgtatcctaggcagtggcccgcccataggtcacaatgtcgaagatcaacaaatacggtctcgaactacactgggctccagaatttccatggatgtttgaggacgcagaggagaagttggataaccctagtagttcagaggtggatatgatttgctccaccactgcgcaaaagctggaaacagacggaatttgtcctgaaaatcatgtgatggtggattgtcgccgacttcttaaacaagagtgttgtgtgcagtctagcctaatacgtgaaattgttatgaatgcaagtccatatgatttggaggtgctacttcaagatgctttgcagtcccgtgaagcagttttggttacaacccccttaggtatgtctttagaggcatgctatgtgagaggttgtaatcctaaaggatggaccatgggtttgtttcggcgtagaagtgtgtgtaacactggtcgttgcactgttaataagcatgtggcctatcagttatatatgattgatcctgcaggtgtctgtcttggtgcaggtcaattcgtgggttgggtcatacccttagcctttatgcctgtgcaatcccggaaatttattgttccatgggttatgtacttgcgtaagcgtggcgaaaagggtgcttacaataaagatcatggacgtggcggttttggacatgtttatgattttaaagttgaagatgcttatgaccaggtgcatgatgagcctaagggtaagttttctaagaaggcttatgctttaattagagggtatcgtggtgttaaaccacttctctatgtagaccagtatggttgtgattatactggtagtcttgcagatggcttagaggcttatgctgataagacattgcaagaaatgaaggcattatttcctacttggagtcaggaactcctttttgatgtaattgtggcatggcatgttgtgcgtgatccacgttatgttatgagattgcagagtgctgctactatacgtagtgttgcatatgttgctaatcctactgaagacttgtgtgatggttctgttgttataaaagaacctgtgcatgtttatgcagatgactctattattttacgtcaatataatttagttgacattatgagtcatttttatatggaggcagatacagttgtaaatgctttttatggtgttgctttgaaagattgcggttttgttatgcagtttggttacattgattgcgaacaagactcgtgtgattttaaaggttggattcctggtaacatgatagatggttttgcttgcaccacttgtggtcatgtttatgaagtaggtgatttgatggcacaatcttcaggtgttttgcctgttaaccctgtattgcatactaagagtgcagcaggctatggtggttttggttgtaaagattcttttactctgtatggccaaactgtagtttattttggaggttgtgtgtattggagtccagcacgtaatatatggattcctatattaaaatcctctgttaagtcatatgacagtttggtttatactggagttttaggttgcaaggctattgtaaaggaaacaaatctcatttgcaaagctttgtaccttgattatgttcaacacaagtgtggcaatttacaccaacgggagttgctaggtgtttcagatgtgtggcataaacaattgctattaaatagaggtgtttataaacctctgttagagaatattgattattttaatatgcggcgcgctaaatttagtttagaaacttttactgtttgtgcagatggctttatgccttttcttttagatgatttagttccacgcgcatattatttggcagtaagtggtcaagcattttgtgattatgcagataaactttgccatgccgttgtgtctaagagtaaagagttacttgatgtgtctctggattctttaggtgcagctatacattatttgaattctaagattgttgatttggctcaacattttagtgattttggaacaagtttcgtttctaaaattgttcatttctttaagacttttactactagcactgctcttgcatttgcatgggttttatttcatgttttgcatggtgcttatatagtagtggagagtgatatatattttgttaaaaacattcctcgttatgctagtgctgttgcacaagcatttcagagtgttgctaaagttgtactggactctttaagagttacttttattgatggcctttcttgttttaagattggacgtagaagaatttgtctttcaggcagaaaaatttatgaagttgagcgtggcttgttacattcatcccaattgccattagatgtttatgatttaaccatgcctagtcaagttcagaaagccaagcaaaaacctatttatttaaaaggttctggttctgatttttcattagcggatagtgtagttgaagttgttacaacttcacttacaccatgtggttattctgaaccacctaaagttgcagctaaaatttgcattgtggataatgtttatatggccaaggctggtgacaaatattaccctgttgtggttgatgatcatgttggactcttggatcaagcatggagagttccttgtgctggaaggcgtgttacatttaaggaacagcctacagtaaaggagattataagcatgcctaagattattaaggttttttatgagcttgacaacgattttaatactattttaaatactgcgtgtggagtgtttgaagtggatgatactgttgatatggaggaattttatgctgtggtgattgatgccatagaagagaaactttctccatgtaaggagcttgaaggtgtaggtgctaaagttagtgcctttttacagaaattagaggataatcccctatttttatttgatgaggctggcgaggaagttcttgctcctaaattgtattgtgcctttacagctcctgaagatgatgactttcttgaggaaagtgatgttgaagaagatgatgtagaaggtgaggaaactgatttaactgtcacaagtgctggacagccttgtgttgctagtgaacaggaggagtcttctgaagtcttagaggacactttggatgatggtccaagtgtggagacatctgattcacaagttgaagaagatgtagaaatgtcggattttgttgatcttgaatctgtgattcaggattatgaaaatgtttgttttgagttttatactacagagccagaatttgttaaagttttgggtctgtatgtgcctaaagcaactcgcaacaattgctggttgcgatcagttttggcagtgatgcagaaattgccctgtcaatttaaagataaaaatttgcaggatctttgggtgttatacaagcaacagtatagtcagttgtttgttgataccttggttaataagatacctgctaatattgtacttccacaaggtggttatgttgctgattttgcatattggtttttaaccttatgtgattggcagtgtgttgcatactggaaatgcattaaatgtgatttagctcttaagcttaaaggcttggatgctatgttcttttatggtgatgttgtttcacatatatgcaagtgtggtgagtctatggtacttattgatgttgatgtgccatttacagcccactttgctcttaaagataagttgttttgtgcatttattactaagcgtattgtgtataaagcagcttgtgttgtggatgttaatgatagtcattctatggctgttgttgatggtaaacaaattgatgatcatcgtatcactagtattactagtgataagtttgattttattattgggcatggtatgtcattttcaatgactacttttgaaattgcccaattgtatggttcttgtataacacctaatgtgtgttttgttaaaggtgatataattaaagtatctaagcttgttaaagcagaagttgttgtaaaccctgctaatggccatatggcacatggtggtggtgttgcaaaagctattgcagtagcagctggacagcagtttgttaaagagactaccgatatggttaagtctaaaggagtttgtgctactggagattgttatgtctctacagggggcaaattatgtaaaactgtgcttaatgttgttggacctgatgcgagaacacagggtaaacaaagttatgtattgttagagcgtgtttataaacatcttaacaactatgactgtgttgttacaactttgatctcagctggtatatttagtgtgccttctgatgtgtctttaacatatctacttggtactgctaagaaacaagttgttcttgttagcaataatcaagaggattttgatcttatttctaagtgtcagataactgctgttgagggcactaagaaattggcagcgcgtctttcttttaatgttggacgttccattgtttacgaaacagatgctaataagttgattttaatcaatgacgttgcatttgtttcgacatttaatgttttacaggatgttttatccttaagacatgatatagcacttgatgatgatgcacgaaccttcgttcagagcaatgttgatgttgtacctgagggttggcgtgttgtcaataagttttatcaaattaatggtgttagaaccgttaagtattttgagtgtactggaggcatagatatatgcagccaggataaagtttttggttatgtacagcagggtatttttaataaggctactgttgctcaaattaaagccttgtttttggataaagtggacatcttgctaactgttgatggtgttaatttcactaataggtttgtgcctgttggtgaaagttttggtaagagtctaggaaatgtgttttgtgatggagttaatgtcacgaagcataagtgtgatataaattataaaggtaaagtctttttccagtttgataatctttctagtgaagatttaaaggctgtaagaagttcctttaattttgatcagaaggaattgcttgcctattacaacatgcttgttaattgttttaagtggcaggttgttgttaatggtaagtatttcacttttaagcaagctaataacaattgttttgttaatgtttcttgcttaatgctccagagtttgcatctgacatttaaaattgttcaatggcaagaggcatggcttgaatttcgttctggccgccctgctagatttgtagctttggttttggccaaaggtgggtttaaatttggagatcctgctgattctagagatttcttgcgtgttgtgtttagtcaagttgatttgactggggcaatatgtgattttgaaattgcatgtaaatgtggtgtaaagcaggaacagcgtactggtctggacgctgttatgcattttggtacattgagtcgtgaagatcttgagattggttataccgtggactgttcttgcggtaaaaagctaattcattgtgtacgatttgatgtaccatttttaatttgcagtaatacacctgctagtgtaaaattacctaagggtgtaggaagtgcaaatatttttataggtgataaggttggtcattatgttcatgttaagtgtgaacaatcttatcagctttatgatgcttctaatgttaagaaggttacagatgttactggcaagttgtcagattgtctgtatcttaaaaatttgaaacaaacttttaaatcggtgttaaccacctattatttggatgatgttaagaaaattgagtataaacctgacttgtcacaatattattgtgacggaggtaagtattatactcagcgtattattaaagcccaatttaaaacattcgagaaagtagatggtgtgtatactaattttaaattgataggacacaccgtctgtgacagtcttaatgctaagttgggttttgatagctctaaagagtttgttgaatataagattactgagtggccaacagctacaggtgatgtggtgttggctactgatgatttgtatgttaagagatatgagaggggttgtattacttttggtaaacctgttatatggttaagccatgagaaagcttccctcaattctttaacatattttaatagaccttcattggttgatgataataaatttgatgttttaaaagtggatgatgttgacgatggtggtgacagctcagagagtggtgccaaagaaaccaaagaaatcaacattattaagttaagtggtgttaaaaaaccatttaaggttgaagatagtgtcattgttaatgatgatactagtgaaaccaaatatgttaagagtttgtctattgttgatgtgtatgatatgtggcttacaggttgtaagtatgttgttagaactgctaatgctttgagcagagcagttaacgtacctacaatacgtaagtttataaaatttggtatgactcttgttagtataccaattgatttgttaaatttaagagagattaagcctgctgttaatgtggttaaagctgtgcgaaataaaatttctgtatgctttaattttattaaatggctttttgtcttattatttggctggattaaaatatccgctgataataaagtaatctacaccacagaaattgcatcaaagcttacgtgtaagcttgtagctttagcttttaaaaatgcatttttgacatttaagtggagtatggttgctagaggtgcttgcattatagcgactatatttctattgtggtttaattttatatatgccaatgtaatttttagtgatttttatttgcctaaaatcggtttcttgccgacttttgttggtaagattgcacagtggattaagaacacttttagtcttgtaactatttgtgatctatattccattcaggatgtgggttttaagaatcagtattgtaatggaagtattgcatgtcagttctgcttggcaggatttgatatgttagataattataaagccattgatgtagtacagtatgaagctgataggagagcatttgttgattatacaggtgtgttaaagattgtcattgaattgatagttagttacgccctgtatacggcatggttttatccattgtttgcccttatcagtattcagatcttgaccacttggctgcctgagctttttatgcttagtacattacattggagttttaggttgctggtggctttagctaatatgttaccagcacatgtgtttatgaggttttatattattattgcctcttttattaagctctttagcttgtttaggcatgttgcctatggttgtagtaaatctggttgtttgttttgttacaagaggaatcgtagtctacgtgttaaatgtagtactatcgttggtggcatgatacgctattacgatgttatggctaatggtggcactggcttttgttcaaaacatcaatggaattgcattgattgtgattcttataaaccaggtaatacttttattactgttgaggccgctcttgatctatctaaggaattgaaacggcccattcagcctacagatgttgcttatcatacggttactgatgttaagcaagttggttgttctatgcgcttgttctatgatcgtgatggacagcgcacatatgatgatgttaatgctagtttgtttgtggattatagtaatttgctacattctaaggttaagagtgtgcctaatatgcatgttgtggtagtggaaaatgatgctgataaagccaattttctgaatgctgctgtattttatgcacagtctttgtttagacctattttaatggttgataaaaatctgataactactgctaacactggtacgtctgttacagaaactatgtttgatgtttatgtggatacatttttgtctatgtttgatgtggataaaaagagtcttaatgctttaatagcaactgcgcattcttctataaaacagggtacgcagatttataaagttttggatacctttttaagctgtgctcgtaaaagttgttctattgattcagatgttgatactaagtgtttagctgattctgtcatgtctgctgtatcggcaggtcttgaattgacggatgaaagttgtaataacttggtgccaacatatttgaagagtgacaacattgtggcagctgatttaggtgttctgattcaaaattctgcaaagcatgtgcagggtaatgttgctaaaatagctggtgtttcctgtatatggtctgtggatgcttttaatcagtttagttctgatttccagcataaattgaagaaagcatgttgtaaaactggtttgaaactgaagcttacttataataagcagatggctaatgtctctgttttaactacaccctttagtcttaaagggggtgcagtttttagttattttgtttatgtgtgttttgtgttgagtttggtctgttttattggactgtggtgcttaatgcccacttacacagtacacaaatcagattttcagcttcccgtttatgccagttataaagttttagataatggtgttattagagatgttagcgttgaagatgtttgtttcgctaacaaatttgaacaatttgatcaatggtatgagtctacatttggtctaagttattatagtaacagtatggcttgtcccattgttgttgctgtaatagatcaggattttggctctacagtgtttaatgtccctaccaaagtgttacgatatggttatcatgtgttgcactttattacacatgcactttctgctgatggagtgcagtgttatacgccacatagtcaaatatcgtattctaatttttatgctagtggctgtgtgctttcctctgcttgcactatgtttacaatggccgatggtagtccacaaccttattgttatacagaggggcttatgcaaaatgcttctctgtatagttcattggtacctcacgtgcggtataatcttgctaatgctaaaggttttatccgttttccagaagtgttgcgagaagggcttgtacgtatcgtgcgtactcgttctatgtcgtattgcagagttggattatgtgaggaagctgatgagggtatatgctttaattttaatggttcttgggtgcttaataatgattattatagatcattgcctgggaccttttgtggtagagatgtttttgatttaatttatcagctatttaaaggtttagcacagcctgtggattttttggcattgactgctagttccattgctggtgctatactcgctgtaattgttgttttggtgttttattacctaataaagcttaaacgtgcttttggtgattacaccagtgttgtttttgttaacgtgattgtgtggtgtgtaaattttatgatgctttttgtgtttcaagtttaccccatactttcttgtgtatatgctatttgttatttttatgccacgctttatttcccttcggagataagtgtgataatgcacttacaatggctagttatgtatggcactattatgcctttatggttttgtttgctatatatagctgttgttgtttcaaatcatgctttttgggtattttcttactgcagaaagcttggtacttctgttcgtagtgatggtacatttgaagaaatggctctcactacttttatgattacaaaagattcttattgtaagcttaagaattctttgtctgatgttgcttttaatagatatttgagtttgtataataaatataggtattacagcggtaaaatggatactgctgcatatagggaggctgcttgctctcagttggctaaagcaatggacacatttaccaataataatggtagtgatgtgctttaccaaccgcctactgcttccgtctcaacttcattcttgcaatctggtattgtgaaaatggtaaatcctacttctaaggtagaaccatgtgttgtcagtgttacctatggtaatatgacattgaatggtttatggttggatgacaaggtctactgtcccagacatgtaatatgttctgcttcagatatgactaatccagattatacaaatttgttgtgtagagtaacatcaagtgattttactgtattgtttgatcgtctaagccttacagtgatgtcttatcaaatgcggggttgtatgcttgttcttacagtgaccctgcaaaattctcgtacgccaaaatatacatttggtgtggttaaacctggtgagacttttactgttttagctgcttataacggcaaaccacaaggagcctttcatgtaactatgcgtagtagttataccattaagggttcctttttatgcggatcttgtggatctgttggttatgtaataatgggtgattgtgttaaatttgtttatatgcatcaattggagcttagtactggttgtcatactggtactgacttcaatggggatttttatggtccttataaggatgctcaggttgttcagttgctcattcaggattatatacaatctgttaattttgtagcatggctttatgctgctatacttaacaattgtaattggtttgtacaaagtgataagtgttctgtagaagattttaatgtgtgggctctgtccaatggatttagccaagttaaatctgaccttgttatagatgctttagcttctatgactggtgtgtctttggaaacactgttggctgctattaagcgtcttaagaatggtttccaaggacgtcagattatgggtagttgctcttttgaggatgaattgacacctagcgatgtttatcaacaactcgctggtatcaagttacaatcaaaacgcactagattgtttaaaggcactgtttgttggattatggcttctacatttttgtttagttgcataattacagcatttgtgaaatggactatgtttatgtatgtaactactaatatgtttagtattacgttttgtgcactttgtgttataagtttggccatgttgttggttaagcataagcatctttatttgactatgtatataactcctgtgctttttacactgttgtataacaactatttggttgtgtacaagcatacatttagaggctatgtctatgcatggctatcatattatgttccatcagttgagtacacttatactgatgaagttatttatggcatgttattgcttgtaggaatggtctttgttacattacgtagcattaaccatgatttgttttcttttataatgtttgttggtcgtttgatttctgttttctctttgtggtacaagggttctaacttagaggaagaaattcttcttatgttggcttccctttttggtacttacacatggacaacagttttatctatggctgtagcaaaggttattgctaagtgggttgctgtgaatgtcttgtatttcacagatatacctcaaattaagatagtgcttttgtgctatttgtttattggttatattattagctgttattggggcttgttttccttgatgaacagtttgtttagaatgcctttgggtgtttataattataaaatttcagtacaggaattaagatatatgaatgctaatggattgcgccctcctaagaatagttttgaagcccttatgcttaattttaagctgttgggtattggaggtgttccaatcattgaagtatctcaatttcaatcaaaattgactgatgtcaaatgtgctaatgtcgtcttgcttaattgcttgcaacatttgcatgttgcttctaattctaagttgtggcattattgtagcactttgcacaatgaaatacttgccacttcggatctgagtgttgcttttgaaaagcttgctcagttattaattgttttgtttgctaatccagctgctgtggatagcaagtgcctgactagtattgaagaagtttgcgatgattacgcaaaggacaatactgttttgcaggctttacagagtgaatttgttaatatggctagcttcgttgaatatgaagttgctaagaaaaatcttgatgaggcgcgttttagtggttctgctaatcaacagcagttaaaacagctagagaaagcctgtaatattgctaaatctgcttatgaacgcgaccgtgctgtagcaaaaaagttggagcgtatggctgatttggctctcactaatatgtataaagaagctagaattaatgataagaagagtaaggttgtttctgccttgcaaactatgctttttagtatggtgcgtaagttagataatcaagctctgaattcaatattagataacgctgtgaagggttgtgtaccattgaatgcaataccttcattggcagcaaatactctgaatataattgtaccagataaaagtgtttatgaccaggtagttgataatgtctatgttacctatgcgggtaatgtatggcagattcaaactatccaggattcagatggtacaaataagcagttgaatgagatatctgatgattgtaactggccactagttattattgcaaatcggtataatgaggtatctgctactgttttgcaaaataatgaattaatgcctgctaagttgaaaattcaggttgttaatagtggtccagatcagacttgtaatacacctactcaatgttactataataatagtaacaatgggaagattgtttatgctatacttagtgatgttgatggtcttaagtatacaaaaattcttaaagatgatggcaattttgttgttttggagttagatcctccttgtaaatttactgttcaagatgctaaaggtcttaaaattaagtacctttattttgtaaaaggttgtaacacactagcaagaggctgggttgttggtacaatttcttctacagttagattgcaagctggaactgctactgaatatgcttccaactcatctatattgtctttatgtgcgttttctgtagatcctaagaaaacgtatttagattttatacaacaaggaggaacacctattgccaattgtgttaaaatgttgtgtgaccatgctggtaccggtatggccattactgttaaacccgatgctaccactagtcaggattcatatggtggtgcgtctgtttgtatatattgccgcgcacgagttgaacacccagatgttgatgggttgtgcaaattacgcggcaagtttgtacaagtgcctgtaggtataaaagatcctgtgtcttatgttttgacacatgatgtttgtcgagtttgtggattttggcgggatggaagttgttcatgtgttagcactgacactactgttcaatcaaaagatactaattttttaaacgggttcggggtacgagtgtagatgcccgtctcgtaccctgcgccagtggtttatctactgatgtacaattaagggcatttgatatttacaatgctagtgttgctggcattggtttacatttaaaagttaattgttgccgttttcagcgtgttgatgagaacggtgataaattagatcagttctttgttgttaagaggacagatctgactatatataatagagagatgaaatgctatgagcgtgtaaaagattgtaagtttgtggctgaacacgatttctttacatttgatgtagaaggtagtcgtgtgccacacattgtacgcaaggatttaacaaagtatactatgttggatctttgctatgcattgcgacattttgatcgcaatgattgcatgctgctttgtgacattctctctatatatgctggttgtgaacaatcctactttactaagaaggattggtatgattttgttgaaaatcctgatattattaatgtgtataaaaagctaggacctatttttaatagagccctagttagcgctactgagtttgcggacaaattggtggaggtaggcttagtaggcgttttaacacttgataatcaagatttaaatggtaaatggtatgattttggtgactatgttattgcagccccaggatgtggtgttgctatagcagattcttattattcttatatcatgcctatgctgaccatgtgtcatgcattggattgcgaattgtatgtgaataatgcttatagactatttgatcttgtacagtatgattttactgattacaagcttgaattgtttaataagtattttaagcactggagtatgccatatcatcctaacactgttgattgtcaggatgatcggtgtattatacattgtgctaattttaacatactttttagtatggttttacctaatacatgttttgggcctcttgttaggcaaatttttgtggatggtgtgccttttgttgtttcaattggctaccattataaagaacttggtattgtgatgaatatggatgtggatacacatcgttatcgcttgtctttaaaagacttgcttttatatgctgctgatccagctttgcatgtagcttctgctagtgcattgtatgatttacgcacttgctgttttagtgttgccgctataacaagcggtgtaaaatttcaaacagttaaacctggtaattttaatcaggatttttatgattttgttttaagtaaaggcctgcttaaagagggtagctcagttgatctgaagcactttttctttacacaggatggtaatgctgctattactgattataattattataagtataatttgcccaccatggtggacattaagcagttgttgtttgttttggaagttgtttataagtattttgagatttatgatggtgggtgtataccggcatcacaagtcattgttaataattatgataagagtgctggctatccatttaacaaatttggaaaagccaggctctattatgaagcattatcatttgaggaacaggatgaaatttacgcttatactaagcgtaatgtcctgccaacacttactcaaatgaatttgaaatatgctattagtgctaagaatagagcccgcactgttgctggtgtttccatacttagtactatgactggcagaatgtttcatcaaaaatgtttgaaaagtatagcagctacacgtggtgttcctgtagttataggcaccactaaattttatggtggctgggatgatatgttacgccgccttattaaagatgttgacaatcctgtacttatgggttgggattatcctaagtgtgatcgtgctatgccaaacctactacgtattgttagtagtttggtattagcccgaaaacatgagacatgttgttcgcaaagcgataggttttatcgacttgcgaatgaatgcgcacaagttttgagtgaaattgttatgtgtggtggctgttattatgttaagcctggtggcactagtagtggtgatgcaactactgcttttgctaattcagtctttaacatatgtcaagctgtttcagccaatgtatgtgccttaatgtcatgcaatggcaataagattgaagatcttagtatacgtgctcttcagaagcgcttatactcacatgtgtatagaagtgataaggttgattcaacctttgtcacagaatattatgaatttttaaataagcattttagtatgatgattttgagtgatgatggggttgtgtgttataattctgattatgcgtccaaagggtatattgctaatataagtgcctttcaacaggtattatattatcaaaataacgtttttatgtcagaatccaaatgttgggttgaacatgacataaataatggacctcatgaattctgttcacaacacacaatgcttgtaaagatggatggtgacgatgtctaccttccatatcctaatcctagtcgtatattaggagctggatgttttgtagatgatttgttaaagactgatagtgttcttttaatagaacgatttgtaagtcttgcaatagatgcttatccacttgtgtatcatgaaaatgaagaataccaaaaggtttttcgtgtttatttggcgtatataaagaagttgtacaatgacctgggtaatcagatcttggatagctacagtgttattttaagtacttgtgatggacaaaagttcactgatgagtccttttacaagaacatgtatttaagaagtgcagttatgcagagtgttggagcttgcgtggtctgctcttctcaaacatcattacgttgtggcagttgcatcagaaagcctcttctttgctgcaagtgttgttatgatcatgttatggcgactgatcataaatatgtcttgagtgtttcaccatatgtgtgtaatgcaccaggatgtgatgtaaatgatgttaccaaattgtatctaggtggtatgtcatattattgtgaagaccataagccacaatattcattcaagttggtaatgaatggtctggtttttggtctatataaacaatcttgtacaggatctccgtacatagacgattttaatcgtatagctagttgtaaatggaccgatgtggatgattacatactagctaatgaatgtacagagcgcttgaaattgtttgctgcagaaacgcaaaaggcaaccgaggaagcctttaagcagagttatgcatcagcaacaatacaagagattgttagtgagcgcgaattgattctctcttgggagattggaaaagttaagccaccacttaataaaaattatgtttttactggctaccattttactaaaaatggtaagacagttttaggtgagtatgtttttgataagagtgagttgactaatggtgtgtattatcgcgccacaaccacttataagctatctgtaggagatgtttttgttttaacctctcattcagtagctaatttaagtgctcctacgcttgttccgcaggagaattatagtagtattagatttgctagtgtttatagtgtgcttgagacgtttcagaacaatgttgttaattatcaacacattggtatgaaacgttactgcaccgtgcaaggacctcctggtacagggaagtcacatcttgctattggtcttgctgtattctattgtacagcacgtgttgtatacacagcggccagccatgcagctgttgacgcattgtgtgaaaaagcatataaatttttgaatataaatgattgcactcgtattgttccggccaaggtcagggtggagtgctatgataagtttaaaattaatgacaccactcgtaagtatgtgtttactaccataaatgcattacctgagatggtgactgatattgttgttgtagatgaagttagtatgcttaccaattatgagctttctgttattaatgctcgtattcgcgctaagcattatgtttatattggtgatcctgctcaattgccagcaccacgtgtgttattgagcaagggtacacttgaacctaaatattttaacactgttactaagctcatgtgttgcttagggccagacatttttcttggtacatgttatagatgtcctaaggaaatcgttgatacagtgtccgccttggtttatgaaaataagcttaaggctaagaatgagagtagttcattgtgttttaaggtctattataagggcgttacaacacatgaaagttctagtgctgtaaatatgcagcagatttatttgattaataagtttttgaaggctaaccctttgtggcataaagctgtttttattagcccatataatagtcagaactttgcagctaagcgtgttttgggtttacaaacccaaaccgtggattctgctcaaggttctgaatatgattatgttatatattcacagactgcagaaacagcgcattctgtaaatgttaatcgcttcaatgttgctattactcgagccaagaaaggtattctttgtgttatgagtaatatgcagttgtttgaagcattacagtttactacattgaccttagataaagtgccacaggccgtcgaaactaaagttcaatgtagtactaatttatttaaagattgtagcaagagttatagcggttatcacccagctcatgctccttcatttttggcagtagatgacaaatataaggcaactggcgatttagccgtgtgtcttggtattggtgattctgctgttacatattcaagattaatatcactcatgggttttaaattggatgttacccttgatgggtattgtaagctttttataactaaagaagaagctgttaaacgcgtgcgtgcctgggttggctttgatgctgaaggtgctcatgccacgcgtgatagcattgggacaaatttcccacttcaattaggattttccacaggaattgattttgttgtggaagccactggtttgtttgctgatagagatggttacagctttaaaaaggctgtggcgaaagctcctcctggtgaacaatttaagcacctcatccctttgatgacgagaggtcatcgctgggatgttgttagacctagaatagtacaaatgtttgcagatcatttaattgatctgtctgattgtgttgtgctagttacatgggcagccaactttgagctcacttgtctccgctactttgcaaaagtagggcgtgagatttcttgtaatgtatgcactaaacgtgccacagtttacaattctagaactggttactatggttgttggcgccatagtgttacatgtgattacttgtataatccacttattgttgatattcaacagtggggatatattggttctttatcaagtaatcatgatttatattgtagtgtccataaaggagcacatgttgcttcctctgatgctataatgacacggtgtttggccgtttatgattgcttttgcaataatattaattggaatgtggagtatcccatcatttcaaatgagttaagtattaatacctcttgtagggtcttgcagcgtgtgattcttaaagctgccatgctctgcaacagatatactttgtgttatgatattggcaacccaaaagcgattgcctgtgtcaaagattttgattttaagttctatgatgcccaaccaattgttaagtctgttaagactcttttgtattcttttgaggcacataaggactcttttaaagacggtttgtgtatgttttggaactgtaatgtggataagtatccaccgaatgcagttgtatgtagatttgacactagagtgttgaataatttaaatcttcctggctgtaatggaggtagtttgtatgttaataaacatgcattccacactaaaccctttgctagggcagcctttgagcatttgaagcctatgccattcttctattattcagatacgccttgtgtgtatatggatggcatggatgctaagcaggttgattatgtacctttgaaatctgccacgtgcatcacaagatgcaatttaggtggtgcagtttgtttaaaacatgctgaagagtatcgtgagtacttagagtcttacaatacagctactacagcaggttttactttttgggtctataagacatttgatttttataatttgtggaatacgttcaccaagctacaaagcttggagaatgttgtatataatttagtcaagactggtcattatacaggacaggctggtgaaatgccttgtgccattataaatgataaagttgtggctaagatcgataaggaggatgttgtcatttttattaataatacaacataccctactaatgtggccgttgaattatttgccaagcgcagtgttcgacaccacccagagcttaagctctttagaaatttaaatatagacgtgtgttggaagcacgtcatttgggattatgctagagaaagtatattttgcagtaatacctatggtgtctgcatgtatacagatttaaagttcattgataaattgaatgtcctttttgatggtcgtgataatggtgctcttgaagcttttaaacgttctaataatggcgtttacatttccacgacaaaagttaagagtctttcgatgataagaggtccaccgcgtgctgaattaaatggcgtagtggtggacaaggttggagacactgattgtgtgttttattttgctgtgcgtaaagaaggtcaggatgtcatcttcagccaattcgacagcctgggagtcagctctaaccagagcccacaaggtaatctggggagtaatggtaaacccggtaatgtcggtggtaatgatgctctgtcaatctctactatctttacacaaagccgtgttattagctcttttacatgtcgtactgatatggaaaaagattttatagctttagatcaagatgtgtttattcagaagtatggtttggaggactatgcctttgaacacattgtttatggtaacttcaaccagaagattattggtggtttgcatttgttaataggcttgtaccgaagacagcaaacttccaatctggttgttcaggagtttgtttcatatgactccagcatacactcttattttatcactgacgagaagagtggtggtagtaagagtgtttgcactgttatagatattttgttggatgattttgtggctcttgttaagtcacttaatcttaattgtgtgagtaaggttgttaatgttaatgttgattttaaagattttcagtttatgctttggtgtaacgatgagaaagttatgactttctatcctcgtttgcaagctgcatctgactggaagcctggttattctatgcctgtattatataagtatttgaattctccaatggaaagagttagtctctggaattatgggaagccagttactttgcctacaggctgtatgatgaatgttgctaagtatactcagttatgtcaatatctgaatactacaacattagctgtacctgttaatatgcgagttttgcatttaggtgcaggttcagaaaaaggagtagcaccgggttctgcagttcttaggcagtggttgcctgctggtactattcttgtagataacgatttatacccatttgttagtgacagtgtcgctacatattttggggattgtataactttaccctttgattgtcaatgggatttgataatttctgatatgtatgaccctattactaagaacataggggagtacaatgtgagtaaagatggtttctttacatacatttgtcatatgattcgagacaagttagctctgggtggcagtgttgctataaaaataacagagttttcttggaatgcagaattatataagttaatggggtattttgcattttggactgtgttttgcacaaatgcaaatgcttcttctagtgaaggatttttaattggcataaattatttgtgtaagcccaaggttgagatagatggaaatgttatgcatgccaattatttgttttggagaaattccacagtttggaacgggggtgcttatagcctgtttgatatggctaaattcccgcttaagttggctggtactgccgtaataaatttaagagcagaccagattaatgatatggtttattcccttcttgaaaagggtaaactacttattagagatacaaataaagaagttttcgttggtgacagtttggttaatgtaatctaaactttaaaaatggctgtcgcttatgcagacaagcctaatcattttatcaattttccacttacccattttcagggttttgtgttaaattataaaggtttacaatttcaaattctcgatgaaggagtggattgtaaaatacaaacagcgccacacattagtcttactatgctggacatacagcctgaagactataaaagtgttgatgtcgctattcaagaagttattgatgatatgcattggggtgatggttttcagattaaatttgagaatcctcacatcctaggaagatgcatagttttagatgttaaaggtgtagaagaattgcatgacgatttagttaattacattcgtgataaaggttgtgttgctgaccaatccaggaaatggattggccattgcaccatagctcaactcacggatgcagcactgtccattaaggaaaatgttgattttataaacagcatgcaattcaattataaaatcaccatcaacccctcatcaccggctagacttgaaatagttaagctcggtgctgaaaagaaagatggtttttatgaaaccatagttagtcactggatgggaattcgttttgaatacacatcacccactgataagctagctatgattatgggttattgttgtttagatgtggtacgtaaagagctagaagaaggcgatcttcccgagaatgatgatgatgcttggtttaagctatcgtaccattatgaaaacaattcttggttcttccgacatgtctacaggaaaagttttcatttccgtaaggcttgtcaaaatttagattgtaattgtttggggttttatgaatcttcagttgaagaatattaaactcagtgaaaatgtttttgcttcctagatttattctagttagctgcataattggtagcttaggtttttacaaccctcctaccaatgttgtttcgcatgtaaatggagattggtttttatttggtgacagtcgttcagattgtaatcatattgttaatatcaacccccataattattcttatatggaccttaatcctgttctgtgtgattctggtaaaatatcatctaaagctggcaactccatttttaggagttttcactttaccgatttttataattacacaggcgaaggtcaacaaattattttttatgagggtgttaattttacgccttatcatgcctttaaatgcaaccgttctggtagtaatgatatttggatgcagaataaaggcttgttttatactcaggtttataagaatatggctgtgtatcgcagccttacttttgttaatgtaccatatgtttataatggctccgcacaagctacagctctttgtaaatctggtagtttagtccttaataaccctgcatatatagctcctcaagctaactctggggattattattataaggttgaagctgatttttatttgtcaggttgtgacgagtatatcgtaccactttgtatttttaacggcaagtttttgtcgaatacaaagtattatgatgatagtcaatattattttaataaagacactggtgttatttatggtctcaattctacagaaaccattaccactggttttgatcttaattgttattatttagttttaccctctggtaattatttagccatttcaaatgagctattgttaactgttcctacgaaagcaatctgtcttaataagcgtaaggattttacgcctgtacaggttgttgattcgcggtggaacaatgccaggcagtctgataacatgacggcggttgcttgtcaacctccgtactgttattttcgtaattctactaccaactatgttggtgtttatgatattaatcatggagatgctggttttactagcatacttagtggtttgttatataattcaccttgtttttcgcagcaaggcgtttttaggtatgataatgttagcagtgtctggcctctctacccctatggcagatgtcccactgctgctgatattaatatccctgatttacccatttgtgtgtatgatccgctaccagttattttgcttggcattcttttgggcgttgcgattgtaattattgtagttttgttgttatattttatggtggataatgttactaggctgcatgatgcttagaccataatctaaacatgtttttgatacttttaatttccttaccaacggcttttgctgttataggagatttaaagtgtacttcagataatattaatgataaagacaccggtcctcctcctataagtactgatactgttgatgttactaatggtttgggtacttattatgttttagatcgtgtgtatttaaatactacgttgtttcttaatggttattaccctacttcaggttccacatatcgtaatatggcactgaagggaagtgtactattgagcagactatggtttaaaccaccatttctttctgattttattaatggtatttttgctaaggtcaaaaataccaaggttattaaagatcgtgtaatgtatagtgagttccctgctataactataggtagtacttttgtaaatacatcctatagtgtggtagtacaaccacgtacaatcaattcaacacaggatggtgataataaattacaaggtcttttagaggtctctgtttgccagtataatatgtgcgagtacccacaaacgatttgtcatcctaacctgggtaatcatcgcaaagaactatggcatttggatacaggtgttgtttcctgtttatataagcgtaatttcacatatgatgtgaatgctgattatttgtattttcatttttatcaagaaggtggtactttttatgcatattttacagacactggtgttgttactaagtttttgtttaatgtttatttaggcatggcgctttcacactattatgtcatgcctctgacttgtaatagtaagcttactttagaatattgggttacacctctcacttctagacaatatttactcgctttcaatcaagatggtattatttttaatgctgttgattgtatgagtgattttatgagtgagattaagtgtaaaacacaatctatagcaccacctactggtgtttatgaattaaacggttacactgttcagccaatcgcagatgtttaccgacgtaaacctaatcttcccaattgcaatatagaagcttggcttaatgataagtcggtgccctctccattaaattgggaacgtaagacattttcaaattgtaattttaatatgagcagcctgatgtcttttattcaggcagactcatttacttgtaataatattgatgctgctaagatatatggtatgtgtttttccagcataactatagataagtttgctatacccaatggcaggaaggttgacctacaattgggtaatttgggctatttgcagtcatttaactatagaattgatactactgcaacaagttgtcagttgtattataatttacctgctgctaatgtttctgttagcaggtttaatccttctacttggaataagagatttggttttatagaagattctgtttttaagcctcgacctgcaggtgttcttactaatcatgatgtagtttatgcacaacactgtttcaaagctcctaaaaatttctgtccgtgtaaattgaatggttcgtgtgtaggtagtggtcctggtaaaaataatggtataggcacttgtcctgcaggtactaattatttaacttgtgataatttgtgcactcctgatcctattacatttacaggtacttataagtgcccccaaactaaatctttagttggcataggtgagcactgttcgggtcttgctgttaaaagtgattattgtggaggcaattcttgtacttgccgaccacaagcatttttgggttggtctgcagactcttgtttacaaggagacaagtgtaatatttttgctaattttattttgcatgatgttaatagtggtcttacttgttctactgatttacaaaaagctaacacagacataattcttggtgtttgtgttaattatgacctctatggtattttaggccaaggcatttttgttgaggttaatgcgacttattataatagttggcagaaccttttatatgattctaatggtaatctctacggttttagagactacataacaaacagaacttttatgattcgtagttgctatagcggtcgtgtttctgcggcctttcacgctaactcttccgaaccagcattgctatttcggaatattaaatgcaactacgtttttaataatagtcttacacgacagctgcaacccattaactattttgatagttatcttggttgtgttgtcaatgcttataatagtactgctatttctgttcaaacatgtgatctcacagtaggtagtggttactgtgtggattactctaaaaacagacgaagtcgtggagcgattaccactggttatcggtttactaattttgagccatttactgttaattcagtaaacgatagtttagaacctgtaggtggtttgtatgaaattcaaataccttcagagtttactataggtaatatggtggagtttattcaaacaagctctcctaaagttactattgattgtgctgcatttgtctgtggtgattatgcagcatgtaaatcacagttggttgaatatggtagtttctgtgataacattaatgccatactcacagaagtaaatgaactacttgacactacacagttgcaagtagctaatagtttaatgaatggtgttactcttagcactaagcttaaagatggcgttaatttcaatgtagacgacatcaatttttcccctgtattaggttgtctaggcagcgaatgtagtaaagcttccagtagatctgctatagaggatttactttttgataaagtaaagttatctgatgtcggttttgttgaggcttataataattgtacaggaggtgccgaaattagggacctcatttgtgtgcaaagttataaaggcatcaaagtgttgcctccactgctctcagaaaatcagatcagtggatacactttggctgccacctctgctagtctatttcctccttggacagcagcagcaggtgtaccattttatttaaatgttcagtatcgcattaatgggcttggtgtcaccatggatgtgctaagtcaaaatcaaaagcttattgctaatgcatttaacaatgccctttatgctattcaggaagggttcgatgcaactaattctgctttagttaaaattcaagctgttgttaatgcaaatgctgaagctcttaataacttattgcaacaactctctaatagatttggtgctataagtgcttctttacaagaaattctatctagacttgatgctcttgaagcggaagctcagatagatagacttattaatggtcgtcttaccgctcttaatgcttatgtttctcaacagcttagtgattctacactggtaaaatttagtgcagcacaagctatggagaaggttaatgaatgtgtcaaaagccaatcatctaggataaatttctgtggtaatggtaatcatattatatcattagtgcagaatgctccatatggtttgtattttatccactttagttatgtccctactaagtatgtcacagcgagggttagtcctggtctgtgcattgctggtgatagaggtatagctcctaagagtggttattttgttaatgtaaataatacttggatgtacactggtagtggttactactaccctgaacctataactgaaaataatgttgttgttatgagtacctgcgctgttaattatactaaagcgccgtatgtaatgctgaacacttcaatacccaaccttcctgattttaaggaagagttggatcaatggtttaaaaatcaaacatcagtggcaccagatttgtcacttgattatataaatgttacattcttggacctacaagttgaaatgaataggttacaggaggcaataaaagtcttaaatcagagctacatcaatctcaaggacattggtacatatgaatattatgtaaaatggccttggtatgtatggcttttaatctgccttgctggtgtagctatgcttgttttactattcttcatatgctgttgtacaggatgtgggactagttgttttaagaaatgtggtggttgttgtgatgattatactggataccaggagttagtaatcaaaacttcacatgacgactaagttcgtctttgattcattgcactgatctcttgttagatctttttgcaatctagcatttgttaaagttcttaaggccacgccctattaatggacatttggagacctgagaagaaatatctccgttatattaacggttttaatgtctcagaattagaagatgcttgttttaaatttaactatcaatttcctaaagtaggatattgtagagttcctagtcatgcttggtgccgtaatcaaggtagattttgtgctacattcactctttatggtaaatccaaacattatgataaatattttggagtaataaatggtttcacagcattcgctaatactgtagaggatgctgttaacaaactggttttcttagctgttgactttattacctggcgcagacaggagttaaatgtttatggctgatgcttatcttgcagacactgtgtggtatgtggggcaaataatttttatagttgccatttgtttattggttacaatagttgtagtggcatttttggcaacttttaaattgtgtattcaactttgcggtatgtgtaataccttagtactgtccccttctatttatgtgtttaatagaggtaggcagttttatgagttttacaatgatgtaaaaccaccagtccttgatgtggatgacgtttaggtaatccaaacattatgagtagtaaaactacaccagcaccagtttatatctggactgctgatgaagctattaaattcctaaaggaatggaatttttctttgggtattatactactttttattacaatcatattgcaatttggatatacaagtcgcagtatgtttgtttatgttattaagatgattattttgtggcttatgtggccccttactataatcttaactattttcaattgcgtatacgcattgaataatgtgtatcttggcctttctatagtttttaccatagtggccattattatgtggattgtgtattttgtgaatagtatcaggttgtttattagaactggaagtttttggagtttcaacccagaaacaaacaacttgatgtgtatagatatgaaaggaacaatgtatgttaggccgataattgaggactatcatactctgacggtcacaataatacgcggccatctttacattcaaggtataaaactaggtactggctattctttggcagatttgccagcttatatgactgttgctaaggttacacacctgtgcacatataagcgtggttttcttgacaggataagcgatactagtggttttgctgtttatgttaagtccaaagtcggtaattaccgactgccatcaacccaaaagggttctggcatggacaccgcattgttgagaaataatatctaaattttaaggatgtcttttactcctggtaagcaatccagtagtagagcgtcctctggaaatcgttctggtaatggcatcctcaagtgggccgatcagtccgaccagtttagaaatgttcaaaccaggggtagaagagctcaacccaagcaaactgctacctctcagcaaccatcaggagggaatgttgtaccctactattcttggttctctggaattactcagtttcaaaagggaaaggagtttgagtttgtagaaggacaaggtgtgcctattgcaccaggagtcccagctactgaagctaaggggtactggtacagacacaacagacgttcttttaaaacagccgatggcaaccagcgtcaactgctgccacgatggtatttttactatctgggaacaggaccgcatgctaaagaccagtacggcaccgatattgacggagtctactgggtcgctagcaaccaggctgatgtcaataccccggctgacattgtcgatcgggacccaagtagcgatgaggctattccgactaggtttccgcctggcacggtactccctcagggttactatattgaaggctcaggaaggtctgctcctaattccagatctacttcgcgcacatccagcagagcctctagtgcaggatcgcgtagtagagccaattctggcaatagaacccctacctctggtgtaacacctgacatggctgatcaaattgctagtcttgttctggcaaaacttggcaaggatgccactaaacctcagcaagtaactaagcatactgccaaagaagtcagacagaaaattttgaataagccccgccagaagaggagccccaataaacaatgcactgttcagcagtgttttggtaagagaggccctaatcagaattttggtggtggagaaatgttaaaacttggaactagtgacccacagttccccattcttgcagaactcgcacccacagctggtgcgtttttctttggatcaagattagagttggccaaagtgcagaatttatctgggaatcctgacgagccccagaaggatgtttatgaattgcgctataacggcgcaattaggtttgacagtacactttcaggttttgagaccataatgaaggtgctgaatgagaatttgaatgcctatcaacaacaagatggtatgatgaatatgagtccaaaaccacagcgtcagcgtggtcataagaatggacaaggagaaaatgataatataagtgttgcagtgcccaaaagccgcgtgcagcaaaataagagtagagagttgactgcagaggacatcagccttcttaagaagatggatgagccctatactgaagacacctcagaaatataagagaatgaaccttatgtcggcatctggtggtaacccctcgcagaaaagtcgagataaggcactctctatcagaatggatgtcttgctgctataatagatagagaaggttatagcagactatagattaattagttgaaagttttgtgttgtaatgtatagtgttggagaaagtgaaagacttgcggaagtaattgccgacaagtgcccaagggaagagccagcatgttaagttaccacccagtaattagtaaatgaatgaagttaattatggccaattggaagaatcacaaaaaaaaaaaaaaaaaaaaaaaaaaaa

SEQ ID NO: 5539 - DNA, 16 bp, Artificial Sequence
  Description of Artificial Sequence: Synthetic oligonucleotide
atcactcttagggaat

SEQ ID NO: 5540 - DNA, 16 bp, Artificial Sequence
  Description of Artificial Sequence: Synthetic oligonucleotide
catcactcttagggaa

SEQ ID NO: 5541 - DNA, 16 bp, Artificial Sequence
  Description of Artificial Sequence: Synthetic oligonucleotide
ccatcactcttaggga

SEQ ID NO: 5542 - DNA, 16 bp, Artificial Sequence
  Description of Artificial Sequence: Synthetic oligonucleotide
gacgggctgcacttac

SEQ ID NO: 5543 - DNA, 16 bp, Artificial Sequence
  Description of Artificial Sequence: Synthetic oligonucleotide
tgcactaatggcatac

SEQ ID NO: 5544 - DNA, 16 bp, Artificial Sequence
  Description of Artificial Sequence: Synthetic oligonucleotide
tgcgagctctattctt

SEQ ID NO: 5545 - DNA, 16 bp, Artificial Sequence
  Description of Artificial Sequence: Synthetic oligonucleotide
gtgcgagctctattct

SEQ ID NO: 5546 - DNA, 16 bp, Artificial Sequence
  Description of Artificial Sequence: Synthetic oligonucleotide
catagtactacagata

SEQ ID NO: 5547 - DNA, 16 bp, Artificial Sequence
  Description of Artificial Sequence: Synthetic oligonucleotide
ttagcataagcagttg

SEQ ID NO: 5548 - DNA, 16 bp, Artificial Sequence
  Description of Artificial Sequence: Synthetic oligonucleotide
aacatgtctggaccta

SEQ ID NO: 5549 - DNA, 16 bp, Artificial Sequence
  Description of Artificial Sequence: Synthetic oligonucleotide
tatcagacattatgca

SEQ ID NO: 5550 - DNA, 16 bp, Artificial Sequence
  Description of Artificial Sequence: Synthetic oligonucleotide
ctatcagacattatgc

SEQ ID NO: 5551 - DNA, 16 bp, Artificial Sequence
  Description of Artificial Sequence: Synthetic oligonucleotide
tctatcagacattatg

SEQ ID NO: 5552 - DNA, 16 bp, Artificial Sequence
  Description of Artificial Sequence: Synthetic oligonucleotide
ctctatcagacattat

SEQ ID NO: 5553 - DNA, 16 bp, Artificial Sequence
  Description of Artificial Sequence: Synthetic oligonucleotide
ctattaacgtacctgt

SEQ ID NO: 5554 - DNA, 16 bp, Artificial Sequence
  Description of Artificial Sequence: Synthetic oligonucleotide
gtacgcacacaatcga

SEQ ID NO: 5555 - DNA, 16 bp, Artificial Sequence
  Description of Artificial Sequence: Synthetic oligonucleotide
cagtacgcacacaatc

SEQ ID NO: 5556 - DNA, 16 bp, Artificial Sequence
  Description of Artificial Sequence: Synthetic oligonucleotide
gccaatttggtcatct

SEQ ID NO: 5557 - DNA, 16 bp, Artificial Sequence
  Description of Artificial Sequence: Synthetic oligonucleotide
aattgtgcaatttgcg

SEQ ID NO: 5558 - DNA, 16 bp, Artificial Sequence
  Description of Artificial Sequence: Synthetic oligonucleotide
ccatataggcagctct

SEQ ID NO: 5559 - DNA, 16 bp, Artificial Sequence
  Description of Artificial Sequence: Synthetic oligonucleotide
tccatataggcagctc

SEQ ID NO: 5560 - DNA, 16 bp, Artificial Sequence
  Description of Artificial Sequence: Synthetic oligonucleotide
ttagggctcttccata

SEQ ID NO: 5561 - DNA, 16 bp, Artificial Sequence
  Description of Artificial Sequence: Synthetic oligonucleotide
atcactcttagggaat

SEQ ID NO: 5562 - DNA, 16 bp, Artificial Sequence
  Description of Artificial Sequence: Synthetic oligonucleotide
catcactcttagggaa

SEQ ID NO: 5563 - DNA, 16 bp, Artificial Sequence
  Description of Artificial Sequence: Synthetic oligonucleotide
ccatcactcttaggga

SEQ ID NO: 5564 - DNA, 16 bp, Artificial Sequence
  Description of Artificial Sequence: Synthetic oligonucleotide
gacgggctgcacttac

SEQ ID NO: 5565 - DNA, 16 bp, Artificial Sequence
  Description of Artificial Sequence: Synthetic oligonucleotide
tgcactaatggcatac

SEQ ID NO: 5566 - DNA, 16 bp, Artificial Sequence
  Description of Artificial Sequence: Synthetic oligonucleotide
tgcgagctctattctt

SEQ ID NO: 5567 - DNA, 16 bp, Artificial Sequence
  Description of Artificial Sequence: Synthetic oligonucleotide
gtgcgagctctattct

SEQ ID NO: 5568 - DNA, 16 bp, Artificial Sequence
  Description of Artificial Sequence: Synthetic oligonucleotide
catagtactacagata

SEQ ID NO: 5569 - DNA, 16 bp, Artificial Sequence
  Description of Artificial Sequence: Synthetic oligonucleotide
ttagcataagcagttg

SEQ ID NO: 5570 - DNA, 16 bp, Artificial Sequence
  Description of Artificial Sequence: Synthetic oligonucleotide
aacatgtctggaccta

SEQ ID NO: 5571 - DNA, 16 bp, Artificial Sequence
  Description of Artificial Sequence: Synthetic oligonucleotide
tatcagacattatgca

SEQ ID NO: 5572 - DNA, 16 bp, Artificial Sequence
  Description of Artificial Sequence: Synthetic oligonucleotide
ctatcagacattatgc

SEQ ID NO: 5573 - DNA, 16 bp, Artificial Sequence
  Description of Artificial Sequence: Synthetic oligonucleotide
tctatcagacattatg

SEQ ID NO: 5574 - DNA, 16 bp, Artificial Sequence
  Description of Artificial Sequence: Synthetic oligonucleotide
ctctatcagacattat

SEQ ID NO: 5575 - DNA, 16 bp, Artificial Sequence
  Description of Artificial Sequence: Synthetic oligonucleotide
ctattaacgtacctgt

SEQ ID NO: 5576 - DNA, 16 bp, Artificial Sequence
  Description of Artificial Sequence: Synthetic oligonucleotide
gtacgcacacaatcga

SEQ ID NO: 5577 - DNA, 16 bp, Artificial Sequence
  Description of Artificial Sequence: Synthetic oligonucleotide
gtacgcacacaatcga

SEQ ID NO: 5578 - DNA, 16 bp, Artificial Sequence
  Description of Artificial Sequence: Synthetic oligonucleotide
cagtacgcacacaatc

SEQ ID NO: 5579 - DNA, 16 bp, Artificial Sequence
  Description of Artificial Sequence: Synthetic oligonucleotide
gccaatttggtcatct

SEQ ID NO: 5580 - DNA, 16 bp, Artificial Sequence
  Description of Artificial Sequence: Synthetic oligonucleotide
aattgtgcaatttgcg

SEQ ID NO: 5581 - DNA, 16 bp, Artificial Sequence
  Description of Artificial Sequence: Synthetic oligonucleotide
ccatataggcagctct

SEQ ID NO: 5582 - DNA, 16 bp, Artificial Sequence
  Description of Artificial Sequence: Synthetic oligonucleotide
tccatataggcagctc

SEQ ID NO: 5583 - DNA, 16 bp, Artificial Sequence
  Description of Artificial Sequence: Synthetic oligonucleotide
ttagggctcttccata

SEQ ID NO: 5584 - DNA, 16 bp, Artificial Sequence
  Description of Artificial Sequence: Synthetic oligonucleotide
atcactcttagggaat

SEQ ID NO: 5585 - DNA, 16 bp, Artificial Sequence
  Description of Artificial Sequence: Synthetic oligonucleotide
catcactcttagggaa

SEQ ID NO: 5586 - DNA, 16 bp, Artificial Sequence
  Description of Artificial Sequence: Synthetic oligonucleotide
ccatcactcttaggga

SEQ ID NO: 5587 - DNA, 16 bp, Artificial Sequence
  Description of Artificial Sequence: Synthetic oligonucleotide
gacgggctgcacttac

SEQ ID NO: 5588 - DNA, 16 bp, Artificial Sequence
  Description of Artificial Sequence: Synthetic oligonucleotide
tgcactaatggcatac

SEQ ID NO: 5589 - DNA, 16 bp, Artificial Sequence
  Description of Artificial Sequence: Synthetic oligonucleotide
tgcgagctctattctt

SEQ ID NO: 5590 - DNA, 16 bp, Artificial Sequence
  Description of Artificial Sequence: Synthetic oligonucleotide
gtgcgagctctattct

SEQ ID NO: 5591 - DNA, 16 bp, Artificial Sequence
  Description of Artificial Sequence: Synthetic oligonucleotide
catagtactacagata

SEQ ID NO: 5592 - DNA, 16 bp, Artificial Sequence
  Description of Artificial Sequence: Synthetic oligonucleotide
ttagcataagcagttg

SEQ ID NO: 5593 - DNA, 16 bp, Artificial Sequence
  Description of Artificial Sequence: Synthetic oligonucleotide
aacatgtctggaccta

SEQ ID NO: 5594 - DNA, 16 bp, Artificial Sequence
  Description of Artificial Sequence: Synthetic oligonucleotide
tatcagacattatgca

SEQ ID NO: 5595 - DNA, 16 bp, Artificial Sequence
  Description of Artificial Sequence: Synthetic oligonucleotide
ctatcagacattatgc

SEQ ID NO: 5596 - DNA, 16 bp, Artificial Sequence
  Description of Artificial Sequence: Synthetic oligonucleotide
tctatcagacattatg

SEQ ID NO: 5597 - DNA, 16 bp, Artificial Sequence
  Description of Artificial Sequence: Synthetic oligonucleotide
ctctatcagacattat

SEQ ID NO: 5598 - DNA, 16 bp, Artificial Sequence
  Description of Artificial Sequence: Synthetic oligonucleotide
ctattaacgtacctgt

SEQ ID NO: 5599 - DNA, 16 bp, Artificial Sequence
  Description of Artificial Sequence: Synthetic oligonucleotide
gtacgcacacaatcga

SEQ ID NO: 5600 - DNA, 16 bp, Artificial Sequence
  Description of Artificial Sequence: Synthetic oligonucleotide
cagtacgcacacaatc

SEQ ID NO: 5601 - DNA, 16 bp, Artificial Sequence
  Description of Artificial Sequence: Synthetic oligonucleotide
gccaatttggtcatct

SEQ ID NO: 5602 - DNA, 16 bp, Artificial Sequence
  Description of Artificial Sequence: Synthetic oligonucleotide
aattgtgcaatttgcg

SEQ ID NO: 5603 - DNA, 16 bp, Artificial Sequence
  Description of Artificial Sequence: Synthetic oligonucleotide
ccatataggcagctct

SEQ ID NO: 5604 - DNA, 16 bp, Artificial Sequence
  Description of Artificial Sequence: Synthetic oligonucleotide
tccatataggcagctc

SEQ ID NO: 5605 - DNA, 16 bp, Artificial Sequence
  Description of Artificial Sequence: Synthetic oligonucleotide
ttagggctcttccata

SEQ ID NO: 5606 - DNA, 16 bp, Artificial Sequence
  Description of Artificial Sequence: Synthetic oligonucleotide
catcactcttagggaa

SEQ ID NO: 5607 - DNA, 16 bp, Artificial Sequence
  Description of Artificial Sequence: Synthetic oligonucleotide
gtgcgagctctattct

SEQ ID NO: 5608 - DNA, 16 bp, Artificial Sequence
  Description of Artificial Sequence: Synthetic oligonucleotide
gtgcgagctctattct

SEQ ID NO: 5609 - DNA, 16 bp, Artificial Sequence
  Description of Artificial Sequence: Synthetic oligonucleotide
ttagggctcttccata

SEQ ID NO: 5610 - DNA, 16 bp, Artificial Sequence
  Description of Artificial Sequence: Synthetic oligonucleotide
ccatcactcttaggga

SEQ ID NO: 5611 - DNA, 16 bp, Artificial Sequence
  Description of Artificial Sequence: Synthetic oligonucleotide
tgcactaatggcatac

SEQ ID NO: 5612 - DNA, 16 bp, Artificial Sequence
  Description of Artificial Sequence: Synthetic oligonucleotide
ttagcataagcagttg

SEQ ID NO: 5613 - DNA, 16 bp, Artificial Sequence
  Description of Artificial Sequence: Synthetic oligonucleotide
ctatcagacattatgc

SEQ ID NO: 5614 - DNA, 16 bp, Artificial Sequence
  Description of Artificial Sequence: Synthetic oligonucleotide
ctattaacgtacctgt

SEQ ID NO: 5615 - DNA, 16 bp, Artificial Sequence
  Description of Artificial Sequence: Synthetic oligonucleotide
gccaatttggtcatct

SEQ ID NO: 5616 - DNA, 16 bp, Artificial Sequence
  Description of Artificial Sequence: Synthetic oligonucleotide
tccatataggcagctc

SEQ ID NO: 5617 - DNA, 16 bp, Artificial Sequence
  Description of Artificial Sequence: Synthetic oligonucleotide
atcactcttagggaat

SEQ ID NO: 5618 - DNA, 16 bp, Artificial Sequence
  Description of Artificial Sequence: Synthetic oligonucleotide
gacgggctgcacttac

SEQ ID NO: 5619 - DNA, 16 bp, Artificial Sequence
  Description of Artificial Sequence: Synthetic oligonucleotide
tgcgagctctattctt

SEQ ID NO: 5620 - DNA, 16 bp, Artificial Sequence
  Description of Artificial Sequence: Synthetic oligonucleotide
catagtactacagata

SEQ ID NO: 5621 - DNA, 16 bp, Artificial Sequence
  Description of Artificial Sequence: Synthetic oligonucleotide
aacatgtctggaccta

SEQ ID NO: 5622 - DNA, 16 bp, Artificial Sequence
  Description of Artificial Sequence: Synthetic oligonucleotide
tatcagacattatgca

SEQ ID NO: 5623 - DNA, 16 bp, Artificial Sequence
  Description of Artificial Sequence: Synthetic oligonucleotide
tctatcagacattatg

SEQ ID NO: 5624 - DNA, 16 bp, Artificial Sequence
  Description of Artificial Sequence: Synthetic oligonucleotide
ctctatcagacattat

SEQ ID NO: 5625 - DNA, 16 bp, Artificial Sequence
  Description of Artificial Sequence: Synthetic oligonucleotide
gtacgcacacaatcga

SEQ ID NO: 5626 - DNA, 16 bp, Artificial Sequence
  Description of Artificial Sequence: Synthetic oligonucleotide
cagtacgcacacaatc

SEQ ID NO: 5627 - DNA, 16 bp, Artificial Sequence
  Description of Artificial Sequence: Synthetic oligonucleotide
aattgtgcaatttgcg

SEQ ID NO: 5628 - DNA, 16 bp, Artificial Sequence
  Description of Artificial Sequence: Synthetic oligonucleotide
ccatataggcagctct

SEQ ID NO: 5629 - DNA, 16 bp, Artificial Sequence
  Description of Artificial Sequence: Synthetic oligonucleotide
ttatcaccgttctcat

SEQ ID NO: 5630 - DNA, 16 bp, Artificial Sequence
  Description of Artificial Sequence: Synthetic oligonucleotide
aatctcccaagagaga

SEQ ID NO: 5631 - DNA, 16 bp, Artificial Sequence
  Description of Artificial Sequence: Synthetic oligonucleotide
aaaatatactttctct

SEQ ID NO: 5632 - DNA, 16 bp, Artificial Sequence
  Description of Artificial Sequence: Synthetic oligonucleotide
tattacgatatgtgga

SEQ ID NO: 5633 - DNA, 16 bp, Artificial Sequence
  Description of Artificial Sequence: Synthetic oligonucleotide
acaagcatcttctaat

SEQ ID NO: 5634 - DNA, 16 bp, Artificial Sequence
  Description of Artificial Sequence: Synthetic oligonucleotide
ctatcagacattatgc

SEQ ID NO: 5635 - DNA, 16 bp, Artificial Sequence
  Description of Artificial Sequence: Synthetic oligonucleotide
tctatcagacattatg

SEQ ID NO: 5636 - DNA, 16 bp, Artificial Sequence
  Description of Artificial Sequence: Synthetic oligonucleotide
ctctatcagacattat

SEQ ID NO: 5637 - DNA, 16 bp, Artificial Sequence
  Description of Artificial Sequence: Synthetic oligonucleotide
ctattaacgtacctgt

SEQ ID NO: 5638 - DNA, 16 bp, Artificial Sequence
  Description of Artificial Sequence: Synthetic oligonucleotide
gtacgcacacaatcga

SEQ ID NO: 5639 - DNA, 16 bp, Artificial Sequence
  Description of Artificial Sequence: Synthetic oligonucleotide
cagtacgcacacaatc

SEQ ID NO: 5640 - DNA, 16 bp, Artificial Sequence
  Description of Artificial Sequence: Synthetic oligonucleotide
gccaatttggtcatct

SEQ ID NO: 5641 - DNA, 16 bp, Artificial Sequence
  Description of Artificial Sequence: Synthetic oligonucleotide
aattgtgcaatttgcg

SEQ ID NO: 5642 - DNA, 16 bp, Artificial Sequence
  Description of Artificial Sequence: Synthetic oligonucleotide
ccatataggcagctct

SEQ ID NO: 5643 - DNA, 16 bp, Artificial Sequence
  Description of Artificial Sequence: Synthetic oligonucleotide
tccatataggcagctc

SEQ ID NO: 5644 - DNA, 16 bp, Artificial Sequence
  Description of Artificial Sequence: Synthetic oligonucleotide
ttagggctcttccata

SEQ ID NO: 5645 - DNA, 16 bp, Artificial Sequence
  Description of Artificial Sequence: Synthetic oligonucleotide
atcactcttagggaat

SEQ ID NO: 5646 - DNA, 16 bp, Artificial Sequence
  Description of Artificial Sequence: Synthetic oligonucleotide
catcactcttagggaa

SEQ ID NO: 5647 - DNA, 16 bp, Artificial Sequence
  Description of Artificial Sequence: Synthetic oligonucleotide
ccatcactcttaggga

SEQ ID NO: 5648 - DNA, 16 bp, Artificial Sequence
  Description of Artificial Sequence: Synthetic oligonucleotide
gacgggctgcacttac

SEQ ID NO: 5649 - DNA, 16 bp, Artificial Sequence
  Description of Artificial Sequence: Synthetic oligonucleotide
tgcactaatggcatac

SEQ ID NO: 5650 - DNA, 16 bp, Artificial Sequence
  Description of Artificial Sequence: Synthetic oligonucleotide
tgcgagctctattctt

SEQ ID NO: 5651 - DNA, 16 bp, Artificial Sequence
  Description of Artificial Sequence: Synthetic oligonucleotide
gtgcgagctctattct

SEQ ID NO: 5652 - DNA, 16 bp, Artificial Sequence
  Description of Artificial Sequence: Synthetic oligonucleotide
catagtactacagata

SEQ ID NO: 5653 - DNA, 16 bp, Artificial Sequence
  Description of Artificial Sequence: Synthetic oligonucleotide
ttagcataagcagttg

SEQ ID NO: 5654 - DNA, 16 bp, Artificial Sequence
  Description of Artificial Sequence: Synthetic oligonucleotide
aacatgtctggaccta

SEQ ID NO: 5655 - DNA, 16 bp, Artificial Sequence
  Description of Artificial Sequence: Synthetic oligonucleotide
tatcagacattatgca

SEQ ID NO: 5656 - DNA, 18 bp, Artificial Sequence
  Description of Artificial Sequence: Synthetic oligonucleotide
agtatacttagcaacatt

SEQ ID NO: 5657 - DNA, 18 bp, Artificial Sequence
  Description of Artificial Sequence: Synthetic oligonucleotide
taggatacaacacgtccc

SEQ ID NO: 5658 - DNA, 18 bp, Artificial Sequence
  Description of Artificial Sequence: Synthetic oligonucleotide
aatataaacaccactatg

SEQ ID NO: 5659 - DNA, 16 bp, Artificial Sequence
  Description of Artificial Sequence: Synthetic oligonucleotide
ctattaacgtacctgt

SEQ ID NO: 5660 - DNA, 16 bp, Artificial Sequence
  Description of Artificial Sequence: Synthetic oligonucleotide
gtacgcacacaatcga

SEQ ID NO: 5661 - DNA, 16 bp, Artificial Sequence
  Description of Artificial Sequence: Synthetic oligonucleotide
cagtacgcacacaatc

SEQ ID NO: 5662 - DNA, 16 bp, Artificial Sequence
  Description of Artificial Sequence: Synthetic oligonucleotide
gccaatttggtcatct

SEQ ID NO: 5663 - DNA, 16 bp, Artificial Sequence
  Description of Artificial Sequence: Synthetic oligonucleotide
aattgtgcaatttgcg

SEQ ID NO: 5664 - DNA, 16 bp, Artificial Sequence
  Description of Artificial Sequence: Synthetic oligonucleotide
ccatataggcagctct

SEQ ID NO: 5665 - DNA, 16 bp, Artificial Sequence
  Description of Artificial Sequence: Synthetic oligonucleotide
tccatataggcagctc

SEQ ID NO: 5666 - DNA, 16 bp, Artificial Sequence
  Description of Artificial Sequence: Synthetic oligonucleotide
ttagggctcttccata

SEQ ID NO: 5667 - DNA, 16 bp, Artificial Sequence
  Description of Artificial Sequence: Synthetic oligonucleotide
atcactcttagggaat

SEQ ID NO: 5668 - DNA, 16 bp, Artificial Sequence
  Description of Artificial Sequence: Synthetic oligonucleotide
atcactcttagggaat

SEQ ID NO: 5669 - DNA, 16 bp, Artificial Sequence
  Description of Artificial Sequence: Synthetic oligonucleotide
tgcactaatggcatac

SEQ ID NO: 5670 - DNA, 16 bp, Artificial Sequence
  Description of Artificial Sequence: Synthetic oligonucleotide
ttagcataagcagttg

SEQ ID NO: 5671 - DNA, 16 bp, Artificial Sequence
  Description of Artificial Sequence: Synthetic oligonucleotide
ctatcagacattatgc

SEQ ID NO: 5672 - DNA, 16 bp, Artificial Sequence
  Description of Artificial Sequence: Synthetic oligonucleotide
catcactcttagggaa

SEQ ID NO: 5673 - DNA, 16 bp, Artificial Sequence
  Description of Artificial Sequence: Synthetic oligonucleotide
ccatcactcttaggga

SEQ ID NO: 5674 - DNA, 16 bp, Artificial Sequence
  Description of Artificial Sequence: Synthetic oligonucleotide
gacgggctgcacttac

SEQ ID NO: 5675 - DNA, 16 bp, Artificial Sequence
  Description of Artificial Sequence: Synthetic oligonucleotide
tgcgagctctattctt

SEQ ID NO: 5676 - DNA, 16 bp, Artificial Sequence
  Description of Artificial Sequence: Synthetic oligonucleotide
gtgcgagctctattct

SEQ ID NO: 5677 - DNA, 16 bp, Artificial Sequence
  Description of Artificial Sequence: Synthetic oligonucleotide
catagtactacagata

SEQ ID NO: 5678 - DNA, 16 bp, Artificial Sequence
  Description of Artificial Sequence: Synthetic oligonucleotide
aacatgtctggaccta

SEQ ID NO: 5679 - DNA, 16 bp, Artificial Sequence
  Description of Artificial Sequence: Synthetic oligonucleotide
tatcagacattatgca

SEQ ID NO: 5680 - DNA, 16 bp, Artificial Sequence
  Description of Artificial Sequence: Synthetic oligonucleotide
tctatcagacattatg

SEQ ID NO: 5681 - DNA, 16 bp, Artificial Sequence
  Description of Artificial Sequence: Synthetic oligonucleotide
ctctatcagacattat

SEQ ID NO: 5682 - DNA, 20 bp, Artificial Sequence
  Description of Artificial Sequence: Synthetic oligonucleotide
ccatcactcttagggaatct

SEQ ID NO: 5683 - DNA, 20 bp, Artificial Sequence
  Description of Artificial Sequence: Synthetic oligonucleotide
tccatcactcttagggaatc

SEQ ID NO: 5684 - DNA, 20 bp, Artificial Sequence
  Description of Artificial Sequence: Synthetic oligonucleotide
ttccatcactcttagggaat

SEQ ID NO: 5685 - DNA, 20 bp, Artificial Sequence
  Description of Artificial Sequence: Synthetic oligonucleotide
gttccatcactcttagggaa

SEQ ID NO: 5686 - DNA, 20 bp, Artificial Sequence
  Description of Artificial Sequence: Synthetic oligonucleotide
agttccatcactcttaggga

SEQ ID NO: 5687 - DNA, 20 bp, Artificial Sequence
  Description of Artificial Sequence: Synthetic oligonucleotide
gacgggctgcacttacaccg

SEQ ID NO: 5688 - DNA, 20 bp, Artificial Sequence
  Description of Artificial Sequence: Synthetic oligonucleotide
agacgggctgcacttacacc

SEQ ID NO: 5689 - DNA, 20 bp, Artificial Sequence
  Description of Artificial Sequence: Synthetic oligonucleotide
aagacgggctgcacttacac

SEQ ID NO: 5690 - DNA, 20 bp, Artificial Sequence
  Description of Artificial Sequence: Synthetic oligonucleotide
taagacgggctgcacttaca

SEQ ID NO: 5691 - DNA, 20 bp, Artificial Sequence
  Description of Artificial Sequence: Synthetic oligonucleotide
gtaagacgggctgcacttac

SEQ ID NO: 5692 - DNA, 20 bp, Artificial Sequence
  Description of Artificial Sequence: Synthetic oligonucleotide
tgcgagctctattctttgca

SEQ ID NO: 5693 - DNA, 20 bp, Artificial Sequence
  Description of Artificial Sequence: Synthetic oligonucleotide
gtgcgagctctattctttgc

SEQ ID NO: 5694 - DNA, 20 bp, Artificial Sequence
  Description of Artificial Sequence: Synthetic oligonucleotide
ggtgcgagctctattctttg

SEQ ID NO: 5695 - DNA, 20 bp, Artificial Sequence
  Description of Artificial Sequence: Synthetic oligonucleotide
cggtgcgagctctattcttt

SEQ ID NO: 5696 - DNA, 20 bp, Artificial Sequence
  Description of Artificial Sequence: Synthetic oligonucleotide
acggtgcgagctctattctt

SEQ ID NO: 5697 - DNA, 20 bp, Artificial Sequence
  Description of Artificial Sequence: Synthetic oligonucleotide
aacatgtctggacctatagt

SEQ ID NO: 5698 - DNA, 20 bp, Artificial Sequence
  Description of Artificial Sequence: Synthetic oligonucleotide
gaacatgtctggacctatag

SEQ ID NO: 5699 - DNA, 20 bp, Artificial Sequence
  Description of Artificial Sequence: Synthetic oligonucleotide
ggaacatgtctggacctata

SEQ ID NO: 5700 - DNA, 20 bp, Artificial Sequence
  Description of Artificial Sequence: Synthetic oligonucleotide
aggaacatgtctggacctat

SEQ ID NO: 5701 - DNA, 20 bp, Artificial Sequence
  Description of Artificial Sequence: Synthetic oligonucleotide
gaggaacatgtctggaccta

SEQ ID NO: 5702 - DNA, 20 bp, Artificial Sequence
  Description of Artificial Sequence: Synthetic oligonucleotide
ccatcactcttagggaatct

SEQ ID NO: 5703 - DNA, 20 bp, Artificial Sequence
  Description of Artificial Sequence: Synthetic oligonucleotide
tccatcactcttagggaatc

SEQ ID NO: 5704 - DNA, 20 bp, Artificial Sequence
  Description of Artificial Sequence: Synthetic oligonucleotide
ttccatcactcttagggaat

SEQ ID NO: 5705 - DNA, 20 bp, Artificial Sequence
  Description of Artificial Sequence: Synthetic oligonucleotide
gttccatcactcttagggaa

SEQ ID NO: 5706 - DNA, 20 bp, Artificial Sequence
  Description of Artificial Sequence: Synthetic oligonucleotide
agttccatcactcttaggga

SEQ ID NO: 5707 - DNA, 20 bp, Artificial Sequence
  Description of Artificial Sequence: Synthetic oligonucleotide
gacgggctgcacttacaccg

SEQ ID NO: 5708 - DNA, 20 bp, Artificial Sequence
  Description of Artificial Sequence: Synthetic oligonucleotide
agacgggctgcacttacacc

SEQ ID NO: 5709 - DNA, 20 bp, Artificial Sequence
  Description of Artificial Sequence: Synthetic oligonucleotide
aagacgggctgcacttacac

SEQ ID NO: 5710 - DNA, 20 bp, Artificial Sequence
  Description of Artificial Sequence: Synthetic oligonucleotide
taagacgggctgcacttaca

SEQ ID NO: 5711 - DNA, 20 bp, Artificial Sequence
  Description of Artificial Sequence: Synthetic oligonucleotide
gtaagacgggctgcacttac

SEQ ID NO: 5712 - DNA, 20 bp, Artificial Sequence
  Description of Artificial Sequence: Synthetic oligonucleotide
tgcgagctctattctttgca

SEQ ID NO: 5713 - DNA, 20 bp, Artificial Sequence
  Description of Artificial Sequence: Synthetic oligonucleotide
gtgcgagctctattctttgc

SEQ ID NO: 5714 - DNA, 20 bp, Artificial Sequence
  Description of Artificial Sequence: Synthetic oligonucleotide
ggtgcgagctctattctttg

SEQ ID NO: 5715 - DNA, 20 bp, Artificial Sequence
  Description of Artificial Sequence: Synthetic oligonucleotide
cggtgcgagctctattcttt

SEQ ID NO: 5716 - DNA, 20 bp, Artificial Sequence
  Description of Artificial Sequence: Synthetic oligonucleotide
aacatgtctggacctatagt

SEQ ID NO: 5717 - DNA, 20 bp, Artificial Sequence
  Description of Artificial Sequence: Synthetic oligonucleotide
gaacatgtctggacctatag

SEQ ID NO: 5718 - DNA, 20 bp, Artificial Sequence
  Description of Artificial Sequence: Synthetic oligonucleotide
ggaacatgtctggacctata

1. An antisense oligonucleotide (ASO) comprising a 5′-wing region (A′), a central region (B′), and a 3′-wing region (C′) that together comprise 8 to 22 total nucleotide units, wherein:
(a) a central region (B′) comprising 6 or more contiguous nucleotide units,
(b) a 5′-wing region (A′) comprising 2 to 6 locked nucleotide units, 2′ substituted nucleotide units, or a combination thereof, and
(c) a 3′-wing region (C′) comprising 2 to 6 locked nucleotide units, 2′ substituted nucleotide units, or a combination thereof; and
wherein the ASO is complementary or hybridizes to a viral target RNA sequence in a coronavirus.

2. The ASO of claim 1, wherein the 5′-wing region of the ASO comprises 2 to 6 phosphorothioate-linked locked nucleosides.

3. The ASO of claim 1, wherein the 3′-wing region of the ASO comprises 2 to 6 phosphorothioate-linked locked nucleosides.

4. The ASO of claim 1, wherein the central region of the ASO comprises at least 5 contiguous phosphorothioate-linked DNA nucleosides.

5. The ASO of claim 1, wherein the central region of the ASO comprises 8 to 10 contiguous phosphorothioate-linked DNA nucleosides.

6. The ASO of claim 2, wherein the locked nucleosides are selected from LNA, scpBNA, AmNA (N—H), AmNA (N-Me), GuNA, GuNA (N-R) where R is selected from Me, Et, i-Pr, t-Bu and combinations thereof.

7. The ASO of claim 1, wherein the 3′-wing region and the 5′-wing region comprise the same number of nucleotide units.

8. The ASO of claim 1, wherein the 3′-wing region and the 5′-wing region comprise 3 nucleotide units and the central region comprises 10 nucleotide units.

9. The ASO of claim 1, wherein the 3′-wing region and the 5′-wing region comprise 4 nucleotide units and the central region comprises 10 nucleotide units.

10. The ASO of claim 1, wherein the 3′-wing region and the 5′-wing region comprise a different number of nucleotide units.

11. The ASO of claim 1, wherein the 3′-wing region comprises 3 nucleotide units, the 5′-wing region comprises 5 nucleotide units, and the central region comprises 10 nucleotide units.

12. The ASO of claim 1 further comprising one or more conjugation moieties.

13. The ASO of claim 1, wherein one Tin the central region is replaced by (2s)T, one C in the central region is replaced by (5OH)C, one A is replaced by (8NH)A in the central region, and/or one G in the central region is replaced by (8NH)G.

14. The ASO of claim 1, wherein the 5′-wing region and/or the 3′-wing region comprises one or two ScpBNA, AmNA, or GuNA.

15. The ASO of claim 1, wherein the 5′-wing region and/or the 3′-wing region comprises a mA or mU appended to the end of the sequence.

16. The ASO of claim 15, wherein the mA or mU is linked to a conjugation moiety.

17. The ASO of claim 1, wherein the ASO comprises 14-22 nucleotide units.

18. The ASO of claim 1, wherein the viral target RNA sequence encodes a non-structural protein (nsp).

19. The ASO of claim 18, wherein the nsp is selected from the group consisting of nsp8, nsp9, nsp10, nsp11, nsp12, nsp13, nsp14, and nsp15.

20. The ASO of claim 1, wherein the ASO comprises at least 8 nucleotide units from any one of SEQ ID NOs: 1-5534.

21. The ASO of claim 1, wherein the ASO comprises a sequence of any one of SEQ ID NOs: 1-5534.

22. The ASO of claim 1, wherein the ASO is at least about 75%, about 76%, about 77%, about 78%, about 79%, about 80%, about 81%, about 82%, about 83%, about 84%, about 85%, about 86%, about 87%, about 88%, about 89%, about 90%, about 91%, about 92%, about 93%, about 94%, about 95%, about 96%, about 97%, about 98%, about 99%, or about 100% identical or complementary to the viral target RNA sequence.

23. The ASO of claim 1, wherein the ASO comprises a sequence that is at least about 75%, about 76%, about 77%, about 78%, about 79%, 80%, about 81%, about 82%, about 83%, about 84%, about 85%, about 86%, about 87%, about 88%, about 89%, about 90%, about 91%, about 92%, about 93%, about 94%, about 95%, about 96%, about 97%, about 98%, about 99%, or about 100% identical or complementary to at least 8 consecutive nucleotide units of GenBank Accession NC_045512.2.

24. The ASO of claim 23, wherein the ASO comprises a sequence that is at least 75%, about 76%, about 77%, about 78%, about 79%, about 80%, about 81%, about 82%, about 83%, about 84%, about 85%, about 86%, about 87%, about 88%, about 89%, about 90%, about 91%, about 92%, about 93%, about 94%, about 95%, about 96%, about 97%, about 98%, about 99%, or about 100% identical or complementary to at least 16 consecutive nucleotide units of GenBank Accession NC_045512.2.

25. The ASO of claim 1, wherein the ASO comprises a sequence that is at least 75%, about 76%, about 77%, about 78%, about 79%, about 80%, about 81%, about 82%, about 83%, about 84%, about 85%, about 86%, about 87%, about 88%, about 89%, about 90%, about 91%, about 92%, about 93%, about 94%, about 95%, about 96%, about 97%, about 98%, about 99%, or about 100% identical or complementary to at least 8 consecutive nucleotide units of any one of the sequences listed in Table 2.

26. The ASO of claim 25, wherein the ASO comprises a sequence that is at least 75%, about 76%, about 77%, about 78%, about 79%, about 80%, about 81%, about 82%, about 83%, about 84%, about 85%, about 86%, about 87%, about 88%, about 89%, about 90%, about 91%, about 92%, about 93%, about 94%, about 95%, about 96%, about 97%, about 98%, about 99%, or about 100% identical or complementary to at least 16 consecutive nucleotide units of any one of the sequences listed in Table 2.

27. An antisense oligonucleotide (ASO) comprising 14-22 nucleotide units, wherein the ASO comprises:
(a) a central region (B′) comprising 6 or more contiguous DNA nucleosides, wherein at least one of the contiguous DNA nucleosides is a modified nucleotide,
(b) a 5′-wing region (A′) comprising 2 to 6 locked nucleosides, 2′ substituted nucleosides, or a combination thereof, and
(c) a 3′-wing region (C′) comprising 2 to 6 locked nucleosides, 2′ substituted nucleosides, or a combination thereof,
wherein the ASO is complementary or hybridizes to a viral target RNA sequence in a coronavirus.

28. The ASO of claim 27, wherein the modified nucleotide occurs at the nucleotide at position 3 from the 5′ end of the central region.

29. The ASO of claim 27 or 28, wherein the modified nucleotide is a nucleotide having a protected or unprotected version of [chemical structure]
wherein:
R is a halogen or R′—C≡C—; and
R′ is C₆₋₁₂ aryl, 5- to 12-membered heteroaryl, hydroxy-C₁₋₆ alkyl, or C₁₋₇ alkanoyloxy.

30. The ASO of claim 27, wherein the modified nucleotide is a nucleotide having the structure of: [chemical structure]
wherein:
W is independently O, N, or S;
R₁, R₂, and R₅ are independently H or D or CH₃ or CD₃;
R₃ is H or F;
R₄ is F or OCH₃ or OCD₃; and
Base is [chemical structure]
wherein:
R is a halogen or R′—C≡C—; and
R′ represents C₆₋₁₂ aryl, 5- to 12-membered heteroaryl, hydroxy-C₁₋₆ alkyl, or C₁₋₇ alkanoyloxy.

31. The ASO of claim 27, wherein the ASO comprises a nucleotide sequence that is at least 90% identical to a nucleotide sequence selected from the sequences listed in Table 1 or 2.

32. The ASO of claim 27, wherein the viral target RNA sequence encodes a non-structural protein (nsp).

33. The ASO of claim 32, wherein the nsp is selected from the group consisting of nsp8, nsp9, nsp10, nsp11, nsp12, nsp13, nsp14, and nsp15.

34. The ASO of claim 27, wherein the ASO is at least about 75%, about 76%, about 77%, about 78%, about 79%, about 80%, about 81%, about 82%, about 83%, about 84%, about 85%, about 86%, about 87%, about 88%, about 89%, about 90%, about 91%, about 92%, about 93%, about 94%, about 95%, about 96%, about 97%, about 98%, about 99%, or about 100% identical or complementary to the viral target RNA sequence.

35. The ASO of claim 1, wherein the coronavirus is a β-coronavirus.

36. The ASO of claim 1, wherein the coronavirus is selected from the group consisting of CoV 229E, CoV NL63, CoV OC43, CoV HKU1, Middle East Respiratory Syndrome (MERS)-CoV, Severe Acute Respiratory Syndrome (SARS)-CoV, and SARS-CoV-2.

37. An antisense oligonucleotide (ASO) comprising any one of SEQ ID NOs: 5539-5718

38. The ASO of claim 37, wherein the ASO is selected from ASO-143 (SEQ ID NO: 5682), ASO-144 (SEQ ID NO: 5683), ASO-145 (SEQ ID NO: 5684), ASO-146 (SEQ ID NO: 5685), ASO-147 (SEQ ID NO: 5686), ASO-148 (SEQ ID NO: 5687), ASO-149 (SEQ ID NO: 5688), ASO-150 (SEQ ID NO: 5689), ASO-151 (SEQ ID NO: 5690), ASO-152 (SEQ ID NO: 5691), ASO-153 (SEQ ID NO: 5692), ASO-154 (SEQ ID NO: 5693), ASO-155 (SEQ ID NO: 5694), ASO-156 (SEQ ID NO: 5695), ASO-158 (SEQ ID NO: 5697), ASO-159 (SEQ ID NO: 5698), ASO-160 (SEQ ID NO: 5699), ASO-163 (SEQ ID NO: 5702), ASO-164 (SEQ ID NO: 5703), ASO-165 (SEQ ID NO: 5704), ASO-166 (SEQ ID NO: 5705), ASO-167 (SEQ ID NO: 5706), ASO-168 (SEQ ID NO: 5707), ASO-169 (SEQ ID NO: 5708), ASO-170 (SEQ ID NO: 5709), ASO-171 (SEQ ID NO: 5710), ASO-172 (SEQ ID NO: 5711), ASO-173 (SEQ ID NO: 5712), ASO-174 (SEQ ID NO: 5713), ASO-175 (SEQ ID NO: 5714), ASO-176 (SEQ ID NO: 5715), ASO-177 (SEQ ID NO: 5716), ASO-178 (SEQ ID NO: 5717), and ASO-179 (SEQ ID NO: 5718).

39-40. (canceled)

41. A pharmaceutical composition comprising one or more of the ASOs of claim 1 and a pharmaceutically acceptable carrier.

42. The pharmaceutical composition of claim 41, wherein the composition is formulated for intravenous (IV), subcutaneous, or inhalation administration.

43-44. (canceled)

45. A method of treating or preventing a disease caused by a β-coronavirus, comprising administering to a subject in need thereof a therapeutically effective amount of one or more of the ASOs of claim 1.

46-51. (canceled)

52. The method of claim 45, wherein the disease a β-coronavirus is a coronavirus infection selected from the group consisting of Middle East Respiratory Syndrome (MERS), Severe Acute Respiratory Syndrome (SARS), and COVID-19.

53. The method of claim 45, wherein the subject has been treated with one or more additional coronavirus treatment agents and/or antiviral agents.

54. The method of claim 45, wherein the subject is concurrently treated with one or more additional coronavirus treatment agents and/or antiviral agents.

55. The method of claim 45, wherein the subject is a human.

56. The method of claim 55, wherein the subject is 60 years old or older.

57-58. (canceled)

59. The method of claim 45, wherein the ASO is administered intravenously, subcutaneously, or via inhalation.

60-61. (canceled)
